(19) United States
(12) Patent Application Publication
(10) Pub. No.: US 2016/0046724 A1
(43) Pub. Date: Feb. 18, 2016

(54) TREATMENT OF CANCER USING HUMANIZED ANTI-BCMA CHIMERIC ANTIGEN RECEPTOR

(71) Applicants: Jennifer Brogdon, Cambridge, MA (US); Eugene Choi, Cambridge, MA (US); Hilmar Erhard Ebersbach, Basel (CH); David Glass, Cambridge, MA (US); Heather Huet, Cambridge, MA (US); Carl H. June, Merion Station, PA (US); Joan Mannick, Cambridge, MA (US); Michael C. Milone, Cherry Hill, NJ (US); Leon Murphy, Cambridge, MA (US); Gabriela Plesa, Blue Bell, PA (US); Celeste Richardson, Cambridge, MA (US); Marco Ruella, Philadelphia, PA (US); Reshma Singh, Cambridge, MA (US); Yongqiang Wang, Shanghai (CN); Qilong Wu, Shanghai (CN)

(72) Inventors: Jennifer Brogdon, Cambridge, MA (US); Eugene Choi, Cambridge, MA (US); Hilmar Erhard Ebersbach, Basel (CH); David Glass, Cambridge, MA (US); Heather Huet, Cambridge, MA (US); Carl H. June, Merion Station, PA (US); Joan Mannick, Cambridge, MA (US); Michael C. Milone, Cherry Hill, NJ (US); Leon Murphy, Cambridge, MA (US); Gabriela Plesa, Blue Bell, PA (US); Celeste Richardson, Cambridge, MA (US); Marco Ruella, Philadelphia, PA (US); Reshma Singh, Cambridge, MA (US); Yongqiang Wang, Shanghai (CN); Qilong Wu, Shanghai (CN)

(73) Assignees: THE TRUSTEES OF THE UNIVERSITY OF PENNSYLVANIA, Philadelphia, PA (US); NOVARTIS AG, Basel (CH)

(21) Appl. No.: 14/805,193

(22) Filed: Jul. 21, 2015

(30) Foreign Application Priority Data
Jul. 21, 2014 (CN) PCT/CN2014/082586
Nov. 6, 2014 (CN) PCT/CN2014/090501

(51) Int. Cl. C07K 16/30; C07K 14/705; A61K 38/17; A61K 35/12; A61K 39/395

(52) U.S. Cl. CPC C07K 16/3061; A61K 35/12; A61K 39/39558; A61K 38/177; C07K 14/705; C07K 2317/565; C07K 2319/33; C07K 2319/30

(57) ABSTRACT

The invention provides compositions and methods for treating diseases associated with expression of BCMA. The invention also relates to chimeric antigen receptor (CAR) specific to BCMA vectors encoding the same, and recombinant T cells comprising the BCMA CAR. The invention also includes methods of administering a genetically modified T cell expressing a CAR that comprises a BCMA binding domain.

[0001] This application claims priority to PCT Application No. PCT/CN2014/090501, filed Nov. 6, 2014, and PCT Application No. PCT/CN2014/082586, filed Jul. 21, 2014. The entire contents of these applications are incorporated herein by reference.

### SEQUENCE LISTING

[0002] The instant application contains a Sequence Listing which has been submitted electronically in ASCII format and is hereby incorporated by reference in its entirety. Said ASCII copy, created on Jul. 15, 2015, is named N2067-7045WO3_SL.txt and is 771,026 bytes in size.

### FIELD OF THE INVENTION

[0003] The present invention relates generally to the use of immune effector cells (e.g., T cells, NK cells) engineered to express a Chimeric Antigen Receptor (CAR) to treat a disease associated with expression of the B-cell maturation antigen protein (BCMA).

### BACKGROUND OF THE INVENTION

[0004] B-cell maturation antigen (BCMA) is a tumor necrosis family receptor (TNFR) member expressed cells of the B-cell lineage. BCMA expression is the highest on terminally differentiated B cells. BCMA is involved in mediating the survival of plasma cells for maintaining long-term humoral immunity. The expression of BCMA has been recently linked to a number of cancers, autoimmune disorders, and infectious diseases. Cancers with increased expression of BCMA include some hematological cancers, such as multiple myeloma, Hodgkin's and non-Hodgkin's lymphoma, various leukemias, and glioblastoma.

### SUMMARY OF THE INVENTION

[0005] In a first aspect, the invention features an isolated nucleic acid molecule encoding a chimeric antigen receptor (CAR), wherein the CAR comprises an antibody or antibody fragment which includes a human anti-BCMA binding domain or a humanized anti-BCMA binding domain, a transmembrane domain, and an intracellular signaling domain (e.g., an intracellular signaling domain comprising a costimulatory domain and/or a primary signaling domain). In one embodiment, the CAR comprises an antibody or antibody fragment which includes a human anti-BCMA binding domain described herein or a humanized anti-BCMA binding domain, described herein, a transmembrane domain described herein, and an intracellular signaling domain described herein (e.g., an intracellular signaling domain comprising a costimulatory domain and/or a primary signaling domain).

[0006] In one embodiment, the encoded BCMA binding domain (e.g., human or humanized anti-BCMA binding domain) comprises one or more (e.g., all three) light chain complementary determining region 1 (LC CDR1), light chain complementary determining region 2 (LC CDR2), and light chain complementary determining region 3 (LC CDR3) of a human or humanized anti-BCMA binding domain described herein, and/or one or more (e.g., all three) heavy chain complementary determining region 1 (HC CDR1), heavy chain complementary determining region 2 (HC CDR2), and heavy chain complementary determining region 3 (HC CDR3) of an anti-BCMA binding domain described herein, e.g., a human or humanized anti-BCMA binding domain comprising one or more, e.g., all three, LC CDRs and one or more, e.g., all three, HC CDRs. In one embodiment, the encoded human anti-BCMA binding domain comprises a light chain variable region described herein (e.g., in Table 1) and/or a heavy chain variable region described herein (e.g., in Table 1). In one embodiment, the encoded humanized anti-BCMA binding domain comprises a light chain variable region provided in SEQ ID NO: 271 or 273 and/or a heavy chain variable region provided in SEQ ID NO: 271 or 273. In one embodiment, the encoded human anti-BCMA binding domain is a scFv comprising a light chain and a heavy chain of an amino acid sequence of Table 1. In one embodiment, the encoded humanized anti-BCMA binding domain is a scFv comprising a light chain and a heavy chain of an amino acid sequence of SEQ ID NO: 271 or 273. In an embodiment, the human or humanized anti-BCMA binding domain (e.g., an scFv) comprises: a light chain variable region comprising an amino acid sequence having at least one, two or three modifications (e.g., substitutions, e.g., conservative substitutions) but not more than 30, 20 or 10 modifications (e.g., substitutions, e.g., conservative substitutions) of an amino acid sequence of a light chain variable region provided in Table 1 or SEQ ID NO: 271 or 273, or a sequence with 95-99% identity with an amino acid sequence of Table 1 or SEQ ID NO: 271 or 273; and/or a heavy chain variable region comprising an amino acid sequence having at least one, two or three modifications (e.g., substitutions, e.g., conservative substitutions) but not more than 30, 20 or 10 modifications (e.g., substitutions, e.g., conservative substitutions) of an amino acid sequence of a heavy chain variable region provided in Table 1 or SEQ ID NO: 271 or 273, or a sequence with 95-99% identity to an amino acid sequence of Table 1. In one embodiment, the encoded human anti-BCMA binding domain comprises a sequence selected from a group consisting of SEQ ID NO: 39, SEQ ID NO: 40, SEQ ID NO: 41, SEQ ID NO: 42, SEQ ID NO: 43, SEQ ID NO: 44, SEQ ID NO: 45, SEQ ID NO: 46, SEQ ID NO: 47, SEQ ID NO: 48, SEQ ID NO: 49, SEQ ID NO: 50, SEQ ID NO: 51, SEQ ID NO: 52, SEQ ID NO: 53, SEQ ID NO: 129, SEQ ID NO: 130, SEQ ID NO: 131, SEQ ID NO: 132, SEQ ID NO: 133, SEQ ID NO: 134, SEQ ID NO: 135, SEQ ID NO: 136, SEQ ID NO: 137, SEQ ID NO: 138, SEQ ID NO: 139, SEQ ID NO: 140, SEQ ID NO: 141, SEQ ID NO: 142, SEQ ID NO: 143, SEQ ID NO: 144, SEQ ID NO: 145, SEQ ID NO: 146, SEQ ID NO: 147, SEQ ID NO: 148, and SEQ ID NO: 149, or a sequence with 95-99% identity thereof. In one embodiment, the encoded humanized anti-BCMA binding domain comprises a sequence selected from a group consisting of SEQ ID NO: 271 or SEQ ID NO: 273, or a sequence with 95-99% identity thereof. In one embodiment, the encoded human or humanized anti-BCMA binding domain includes a (Gly4-Ser)n linker, wherein n is 1, 2, 3, 4, 5, or 6, preferably 3 or 4 (SEQ ID NO:26). The light chain variable region and heavy chain variable region of a scFv can be, e.g., in any of the following orientations: light chain variable region-linker-heavy chain variable region or heavy chain variable region-linker-light chain variable region.

[0007] In other embodiments, the encoded BCMA binding domain comprises a HC CDR1, a HC CDR2, and a HC CDR3 of any BCMA heavy chain binding domain amino acid sequences listed in Table 1 or 16. In embodiments, the BCMA binding domain further comprises a LC CDR1, a LC CDR2, and a LC CDR3. In embodiments, the BCMA binding domain comprises a LC CDR1, a LC CDR2, and a LC CDR3 of any BCMA light chain binding domain amino acid sequences listed in Table 1 or 16.

[0008] In some embodiments, the encoded BCMA binding domain comprises one, two or all of LC CDR1, LC CDR2, and LC CDR3 of any BCMA light chain binding domain amino acid sequences listed in Table 1 or 16, and one, two or all of HC CDR1, HC CDR2, and HC CDR3 of any BCMA heavy chain binding domain amino acid sequences listed in Table 1 or 16.

[0009] In one embodiment, the encoded anti-BCMA binding domain comprises a light chain variable region described herein (e.g., in Table 16) and/or a heavy chain variable region described herein (e.g., in Table 16). In one embodiment, the encoded humanized anti-BCMA binding domain comprises a light chain variable region provided in SEQ ID NO: 259, SEQ ID NO: 260, SEQ ID NO: 261, SEQ ID NO: 262, and/or a heavy chain variable region provided in SEQ ID NO: 255, SEQ ID NO: 256, SEQ ID NO: 257, SEQ ID NO: 258. In one embodiment, the encoded anti-BCMA binding domain is a scFv comprising a light chain and a heavy chain of an amino acid sequence of Table 16. In an embodiment, the human or humanized anti-BCMA binding domain (e.g., an scFv) comprises: a light chain variable region comprising an amino acid sequence having at least one, two or three modifications (e.g., substitutions, e.g., conservative substitutions) but not more than 30, 20 or 10 modifications (e.g., substitutions, e.g., conservative substitutions) of an amino acid sequence of a light chain variable region provided in SEQ ID NO: 259, SEQ ID NO: 260, SEQ ID NO: 261, SEQ ID NO: 262, or a sequence with 95-99% identity thereof; and/or a heavy chain variable region comprising an amino acid sequence having at least one, two or three modifications (e.g., substitutions, e.g., conservative substitutions) but not more than 30, 20 or 10 modifications (e.g., substitutions, e.g., conservative substitutions) of an amino acid sequence of a heavy chain variable region provided in SEQ ID NO: 255, SEQ ID NO: 256, SEQ ID NO: 257, SEQ ID NO: 258, or a sequence with 95-99% identity thereof. In one embodiment, the encoded anti-BCMA binding domain includes a (Gly4-Ser)n linker, wherein n is 1, 2, 3, 4, 5, or 6, preferably 3 or 4 (SEQ ID NO:26). The light chain variable region and heavy chain variable region of a scFv can be, e.g., in any of the following orientations: light chain variable region-linker-heavy chain variable region or heavy chain variable region-linker-light chain variable region.

[0010] In one embodiment, the encoded human anti-BCMA binding domain comprises a sequence selected from a group consisting of SEQ ID NO: 263, SEQ ID NO: 264, SEQ ID NO: 265, and SEQ ID NO: 266, or a sequence with 95-99% identity thereof.

[0011] In one embodiment, the encoded CAR includes a transmembrane domain that comprises a transmembrane domain of a protein, e.g., described herein, e.g., selected from the group consisting of the alpha, beta or zeta chain of the T-cell receptor, CD28, CD3 epsilon, CD45, CD4, CD5, CD8, CD9, CD16, CD22, CD33, CD37, CD64, CD80, CD86, CD134, CD137 and CD154. In one embodiment, the encoded transmembrane domain comprises the sequence of SEQ ID NO: 6. In one embodiment, the encoded transmembrane domain comprises an amino acid sequence comprising at least one, two or three modifications but not more than 20, 10 or 5 modifications of the amino acid sequence of SEQ ID NO:6, or a sequence with 95-99% identity to an amino acid sequence of SEQ ID NO:6. In one embodiment, the nucleic acid sequence encoding the transmembrane domain comprises the sequence of SEQ ID NO: 17, or a sequence with 95-99% identity thereof.

[0012] In one embodiment, the encoded anti-BCMA binding domain is connected to the transmembrane domain by a hinge region, e.g., a hinge region described herein. In one embodiment, the encoded hinge region comprises SEQ ID NO:2, or a sequence with 95-99% identity thereof. In one embodiment, the nucleic acid sequence encoding the hinge region comprises the sequence of SEQ ID NO: 13, or a sequence with 95-99% identity thereof.

[0013] In one embodiment, the isolated nucleic acid molecule further comprises a sequence encoding a costimulatory domain, e.g., a costimulatory domain described herein. In embodiments, the intracellular signaling domain comprises a costimulatory domain. In embodiments, the intracellular signaling domain comprises a primary signaling domain. In embodiments, the intracellular signaling domain comprises one or more (e.g., one or more, two or more, or three or more) of a costimulatory domain and a primary signaling domain.

[0014] In one embodiment, the encoded costimulatory domain is a functional signaling domain obtained from a protein, e.g., described herein, e.g., selected from the group consisting of MHC class I molecule, TNF receptor proteins, Immunoglobulin-like proteins, cytokine receptors, integrins, signaling lymphocytic activation molecules (SLAM proteins), activating NK cell receptors, BTLA, a Toll ligand receptor, OX40, CD2, CD7, CD27, CD28, CD30, CD40, CDS, ICAM-1, LFA-1 (CD11a/CD18), 4-1BB (CD137), B7-H3, CDS, ICAM-1, ICOS (CD278), GITR, BAFFR, LIGHT, HVEM (LIGHTR), KIRDS2, SLAMF7, NKp80 (KLRF1), NKp44, NKp30, NKp46, CD19, CD4, CD8alpha, CD8beta, IL2R beta, IL2R gamma, IL7R alpha, ITGA4, VLA1, CD49a, ITGA4, IA4, CD49D, ITGA6, VLA-6, CD49f, ITGAD, CD11d, ITGAE, CD103, ITGAL, CD11a, LFA-1, ITGAM, CD11b, ITGAX, CD11c, ITGB1, CD29, ITGB2, CD18, LFA-1, ITGB7, NKG2D, NKG2C, TNFR2, TRANCE/RANKL, DNAM1 (CD226), SLAMF4 (CD244, 2B4), CD84, CD96 (Tactile), CEACAM1, CRTAM, Ly9 (CD229), CD160 (BY55), PSGL1, CD100 (SEMA4D), CD69, SLAMF6 (NTB-A, Ly108), SLAM (SLAMF1, CD150, IPO-3), BLAME (SLAMF8), SELPLG (CD162), LTBR, LAT, GADS, SLP-76, PAG/Cbp, CD19a, and a ligand that specifically binds with CD83. In embodiments, the encoded costimulatory domain comprises 4-1BB, CD27, CD28, or ICOS.

[0015] In one embodiment, the encoded costimulatory domain of 4-1BB comprises the amino acid sequence of SEQ ID NO:7. In one embodiment, the encoded costimulatory domain comprises an amino acid sequence having at least one, two or three modifications but not more than 20, 10 or 5 modifications of an amino acid sequence of SEQ ID NO:7, or a sequence with 95-99% identity to an amino acid sequence of SEQ ID NO:7. In one embodiment, the nucleic acid sequence encoding the costimulatory domain comprises the nucleotide sequence of SEQ ID NO:18, or a sequence with 95-99% identity thereof. In another embodiment, the encoded costimulatory domain of CD28 comprises the amino acid sequence of SEQ ID NO:1104. In one embodiment, the encoded costimulatory domain comprises an amino acid sequence having at least one, two or three modifications but not more than 20, 10 or 5 modifications of an amino acid sequence of SEQ ID NO:1104, or a sequence with 95-99% identity to an amino acid sequence of SEQ ID NO:1104. In one embodiment, the nucleic acid sequence encoding the costimulatory domain of CD28 comprises the nucleotide sequence of SEQ ID NO:1105 or a sequence with 95-99% identity thereof. In another embodiment, the encoded costimulatory domain of CD27 comprises the amino acid sequence of SEQ ID NO:8. In one embodiment, the encoded costimulatory domain comprises an amino acid sequence having at least one, two or three modifications but not more than 20, 10 or 5 modifications of an amino acid sequence of SEQ ID NO:8, or a sequence with 95-99% identity to an amino acid sequence of SEQ ID NO:8. In one embodiment, the nucleic acid sequence encoding the costimulatory domain of CD27 comprises the nucleotide sequence of SEQ ID NO:19, or a sequence with 95-99% identity thereof. In another embodiment, the encoded costimulatory domain of ICOS comprises the amino acid sequence of SEQ ID NO:1106. In one embodiment, the encoded costimulatory domain comprises an amino acid sequence having at least one, two or three modifications but not more than 20, 10 or 5 modifications of an amino acid sequence of SEQ ID NO:1106, or a sequence with 95-99% identity to an amino acid sequence of SEQ ID NO:1106. In one embodiment, the nucleic acid sequence encoding the costimulatory domain of ICOS comprises the nucleotide sequence of SEQ ID NO:1107 or a sequence with 95-99% identity thereof.

[0016] In embodiments, the encoded primary signaling domain comprises a functional signaling domain of CD3 zeta. In embodiments, the functional signaling domain of CD3 zeta comprises the amino acid sequence of SEQ ID NO: 9 (mutant CD3zeta) or SEQ ID NO: 10 (wild type human CD3zeta), or a sequence with 95-99% identity thereof.

[0017] In one embodiment, the encoded intracellular signaling domain comprises a functional signaling domain of 4-1BB and/or a functional signaling domain of CD3 zeta. In one embodiment, the encoded intracellular signaling domain of 4-1BB comprises the amino acid sequence of SEQ ID NO: 7 and/or the CD3 zeta amino acid sequence of SEQ ID NO:9 or SEQ ID NO:10. In one embodiment, the intracellular signaling domain comprises an amino acid sequence having at least one, two or three modifications but not more than 20, 10 or 5 modifications of an amino acid sequence of SEQ ID NO:7 and/or an amino acid sequence of SEQ ID NO:9 or SEQ ID NO:10, or a sequence with 95-99% identity to an amino acid sequence of SEQ ID NO:7 and/or an amino acid sequence of SEQ ID NO:9 or SEQ ID NO:10. In one embodiment, the encoded intracellular signaling domain comprises the sequence of SEQ ID NO:7 and the sequence of SEQ ID NO:9 or SEQ ID NO:10, wherein the sequences comprising the intracellular signaling domain are expressed in the same frame and as a single polypeptide chain. In one embodiment, the nucleic acid sequence encoding the intracellular signaling domain of 4-1BB comprises the nucleotide sequence of SEQ ID NO:18, or a sequence with 95-99% identity thereof, and/or the CD3 zeta nucleotide sequence of SEQ ID NO:20 or SEQ ID NO:21, or a sequence with 95-99% identity thereof.

[0018] In one embodiment, the encoded intracellular signaling domain comprises a functional signaling domain of CD27 and/or a functional signaling domain of CD3 zeta. In one embodiment, the encoded intracellular signaling domain of CD27 comprises the amino acid sequence of SEQ ID NO: 8 and/or the CD3 zeta amino acid sequence of SEQ ID NO:9 or SEQ ID NO:10. In one embodiment, the intracellular signaling domain comprises an amino acid sequence having at least one, two or three modifications but not more than 20, 10 or 5 modifications of an amino acid sequence of SEQ ID NO:8 and/or an amino acid sequence of SEQ ID NO:9 or SEQ ID NO:10, or a sequence with 95-99% identity to an amino acid sequence of SEQ ID NO:8 and/or an amino acid sequence of SEQ ID NO:9 or SEQ ID NO:10. In one embodiment, the encoded intracellular signaling domain comprises the sequence of SEQ ID NO:8 and the sequence of SEQ ID NO:9 or SEQ ID NO:10, wherein the sequences comprising the intracellular signaling domain are expressed in the same frame and as a single polypeptide chain. In one embodiment, the nucleic acid sequence encoding the intracellular signaling domain of CD27 comprises the nucleotide sequence of SEQ ID NO:19, or a sequence with 95-99% identity thereof, and/or the CD3 zeta nucleotide sequence of SEQ ID NO:20 or SEQ ID NO:21, or a sequence with 95-99% identity thereof.

[0019] In one embodiment, the encoded intracellular signaling domain comprises a functional signaling domain of CD28 and/or a functional signaling domain of CD3 zeta. In one embodiment, the encoded intracellular signaling domain of CD28 comprises the amino acid sequence of SEQ ID NO: 1104 and/or the CD3 zeta amino acid sequence of SEQ ID NO:9 or SEQ ID NO:10. In one embodiment, the intracellular signaling domain comprises an amino acid sequence having at least one, two or three modifications but not more than 20, 10 or 5 modifications of an amino acid sequence of SEQ ID NO:1104 and/or an amino acid sequence of SEQ ID NO:9 or SEQ ID NO:10, or a sequence with 95-99% identity to an amino acid sequence of SEQ ID NO:1104 and/or an amino acid sequence of SEQ ID NO:9 or SEQ ID NO:10. In one embodiment, the encoded intracellular signaling domain comprises the sequence of SEQ ID NO:1104 and the sequence of SEQ ID NO:9 or SEQ ID NO:10, wherein the sequences comprising the intracellular signaling domain are expressed in the same frame and as a single polypeptide chain. In one embodiment, the nucleic acid sequence encoding the intracellular signaling domain of CD28 comprises the nucleotide sequence of SEQ ID NO:1105, or a sequence with 95-99% identity thereof, and/or the CD3 zeta nucleotide sequence of SEQ ID NO:20 or SEQ ID NO:21, or a sequence with 95-99% identity thereof.

[0020] In one embodiment, the encoded intracellular signaling domain comprises a functional signaling domain of ICOS and/or a functional signaling domain of CD3 zeta. In one embodiment, the encoded intracellular signaling domain of ICOS comprises the amino acid sequence of SEQ ID NO: 1106 and/or the CD3 zeta amino acid sequence of SEQ ID NO:9 or SEQ ID NO:10. In one embodiment, the intracellular signaling domain comprises an amino acid sequence having at least one, two or three modifications but not more than 20, 10 or 5 modifications of an amino acid sequence of SEQ ID NO:1106 and/or an amino acid sequence of SEQ ID NO:9 or SEQ ID NO:10, or a sequence with 95-99% identity to an amino acid sequence of SEQ ID NO:1106 and/or an amino acid sequence of SEQ ID NO:9 or SEQ ID NO:10. In one embodiment, the encoded intracellular signaling domain comprises the sequence of SEQ ID NO:1106 and the sequence of SEQ ID NO:9 or SEQ ID NO:10, wherein the sequences comprising the intracellular signaling domain are expressed in the same frame and as a single polypeptide chain. In one embodiment, the nucleic acid sequence encoding the intracellular signaling domain of ICOS comprises the nucleotide sequence of SEQ ID NO:1107, or a sequence with 95-99% identity thereof, and/or the CD3 zeta nucleotide sequence of SEQ ID NO:20 or SEQ ID NO:21, or a sequence with 95-99% identity thereof.

[0021] In another aspect, the invention pertains to an isolated nucleic acid molecule encoding a CAR construct comprising a leader sequence, e.g., a leader sequence described herein, e.g., the amino acid sequence of SEQ ID NO: 1; an anti-BCMA binding domain described herein, e.g., human anti-BCMA binding domain comprising a LC CDR1, a LC CDR2, a LC CDR3, a HC CDR1, a HC CDR2 and a HC CDR3 described herein (e.g., a human anti-BCMA binding domain described in Table 1 or 16), or a sequence with 95-99% identify thereof; a hinge region described herein, e.g., the amino acid sequence of SEQ ID NO:2; a transmembrane domain described herein, e.g., having a sequence of SEQ ID NO: 6; and an intracellular signaling domain, e.g., an intracellular signaling domain described herein. In one embodiment, the encoded intracellular signaling domain comprises a costimulatory domain, e.g., a costimulatory domain described herein (e.g., a 4-1BB costimulatory domain having the amino acid sequence of SEQ ID NO:7 or a CD27 costimulatory domain having the amino acid sequence of SEQ ID NO:8), and/or a primary signaling domain, e.g., a primary signaling domain described herein, (e.g., a CD3 zeta stimulatory domain having a sequence of SEQ ID NO:9 or SEQ ID NO:10). In one embodiment, the isolated nucleic acid molecule encoding the CAR construct includes a leader sequence encoded by the nucleic acid sequence of SEQ ID NO:1, or a sequence with 95-99% identity thereto.

[0022] In another aspect, the invention pertains to an isolated nucleic acid molecule encoding a CAR construct comprising a leader sequence, e.g., a leader sequence described herein, e.g., the amino acid sequence of SEQ ID NO: 1; an anti-BCMA binding domain described herein (e.g., humanized anti-BCMA binding domain comprising a LC CDR1, a LC CDR2, a LC CDR3, a HC CDR1, a HC CDR2 and/or a HC CDR3 described herein, e.g., a humanized anti-BCMA binding domain described herein (e.g., a humanized anti-BCMA binding domain comprising a sequence selected from a group consisting of SEQ ID NO: 271 or SEQ ID NO: 273), or a sequence with 95-99% identify thereof); a hinge region described herein, e.g., the amino acid sequence of SEQ ID NO:2; a transmembrane domain described herein, e.g., having a sequence of SEQ ID NO: 6, and an intracellular signaling domain, e.g., an intracellular signaling domain described herein. In one embodiment, the encoded intracellular signaling domain comprises a costimulatory domain, e.g., a costimulatory domain described herein (e.g., a 4-1BB costimulatory domain having a sequence of SEQ ID NO:7), and/or a primary signaling domain, e.g., a primary signaling domain described herein (e.g., a CD3 zeta stimulatory domain having a sequence of SEQ ID NO:9 or SEQ ID NO:10). In one embodiment, the isolated nucleic acid molecule encoding the CAR construct includes a leader sequence encoded by the nucleic acid sequence of SEQ ID NO:1, or a sequence with 95-99% identity thereto.

[0023] In one embodiment, the isolated nucleic acid molecule encoding the CAR construct includes a human anti-BCMA binding domain sequence encoded by the nucleic acid sequence of SEQ ID NO: 54, SEQ ID NO: 55, SEQ ID NO: 56, SEQ ID NO: 57, SEQ ID NO: 58, SEQ ID NO: 59, SEQ ID NO: 60, SEQ ID NO: 61, SEQ ID NO: 62, SEQ ID NO: 63, SEQ ID NO: 64, SEQ ID NO: 65, SEQ ID NO: 66, SEQ ID NO: 67, SEQ ID NO: 68, SEQ ID NO: 150, SEQ ID NO: 151, SEQ ID NO: 152, SEQ ID NO: 153, SEQ ID NO: 154, SEQ ID NO: 155, SEQ ID NO: 156, SEQ ID NO: 157, SEQ ID NO: 158, SEQ ID NO: 159, SEQ ID NO: 160, SEQ ID NO: 161, SEQ ID NO: 162, SEQ ID NO: 163, SEQ ID NO: 164, SEQ ID NO: 165, SEQ ID NO: 166, SEQ ID NO: 167, SEQ ID NO: 168, SEQ ID NO: 169, or SEQ ID NO: 170, or a sequence with 95-99% identity thereto. In one embodiment, the isolated nucleic acid molecule encoding the CAR construct includes a humanized anti-BCMA binding domain sequence encoded by the nucleic acid sequence of SEQ ID NO: 272, SEQ ID NO: 274, or a sequence with 95-99% identity thereto.

[0024] In one embodiment, the isolated nucleic acid molecule comprises (e.g., consists of) a nucleic acid encoding a CAR amino acid sequence of SEQ ID NO: 99, SEQ ID NO: 100, SEQ ID NO: 101, SEQ ID NO: 102, SEQ ID NO: 103, SEQ ID NO: 104, SEQ ID NO: 105, SEQ ID NO: 106, SEQ ID NO: 107, SEQ ID NO: 108, SEQ ID NO: 109, SEQ ID NO: 110, SEQ ID NO: 111, SEQ ID NO: 112, SEQ ID NO: 113, SEQ ID NO: 213, SEQ ID NO: 214, SEQ ID NO: 215, SEQ ID NO: 216, SEQ ID NO: 217, SEQ ID NO: 218, SEQ ID NO: 219, SEQ ID NO: 220, SEQ ID NO: 221, SEQ ID NO: 222, SEQ ID NO: 223, SEQ ID NO: 224, SEQ ID NO: 225, SEQ ID NO: 226, SEQ ID NO: 227, SEQ ID NO: 228, SEQ ID NO: 229, SEQ ID NO: 230, SEQ ID NO: 231, SEQ ID NO: 232, or SEQ ID NO: 233, or an amino acid sequence having 85%, 90%, 95%, 96%, 97%, 98% or 99% identity to or having one, two or three modifications (e.g., substitutions, e.g., conservative substitutions) but not more than 30, 20 or 10 modifications (e.g., substitutions, e.g., conservative substitutions) of an amino acid sequence of an amino acid sequence of SEQ ID NO: 99, SEQ ID NO: 100, SEQ ID NO: 101, SEQ ID NO: 102, SEQ ID NO: 103, SEQ ID NO: 104, SEQ ID NO: 105, SEQ ID NO: 106, SEQ ID NO: 107, SEQ ID NO: 108, SEQ ID NO: 109, SEQ ID NO: 110, SEQ ID NO: 111, SEQ ID NO: 112, SEQ ID NO: 113, SEQ ID NO: 213, SEQ ID NO: 214, SEQ ID NO: 215, SEQ ID NO: 216, SEQ ID NO: 217, SEQ ID NO: 218, SEQ ID NO: 219, SEQ ID NO: 220, SEQ ID NO: 221, SEQ ID NO: 222, SEQ ID NO: 223, SEQ ID NO: 224, SEQ ID NO: 225, SEQ ID NO: 226, SEQ ID NO: 227, SEQ ID NO: 228, SEQ ID NO: 229, SEQ ID NO: 230, SEQ ID NO: 231, SEQ ID NO: 232, or SEQ ID NO: 233.

[0025] In one embodiment, the isolated nucleic acid molecule comprises (e.g., consists of) a nucleic acid sequence of SEQ ID NO: 114, SEQ ID NO: 115, SEQ ID NO: 116, SEQ ID NO: 117, SEQ ID NO: 118, SEQ ID NO: 119, SEQ ID NO: 120, SEQ ID NO: 121, SEQ ID NO: 122, SEQ ID NO: 123, SEQ ID NO: 124, SEQ ID NO: 125, SEQ ID NO: 126, SEQ ID NO: 127, SEQ ID NO: 128, SEQ ID NO: 234, SEQ ID NO: 235, SEQ ID NO: 236, SEQ ID NO: 237, SEQ ID NO: 238, SEQ ID NO: 239, SEQ ID NO: 240, SEQ ID NO: 241, SEQ ID NO: 242, SEQ ID NO: 243, SEQ ID NO: 244, SEQ ID NO: 245, SEQ ID NO: 246, SEQ ID NO: 247, SEQ ID NO: 248, SEQ ID NO: 249, SEQ ID NO: 250, SEQ ID NO: 251, SEQ ID NO: 252, SEQ ID NO: 253, or SEQ ID NO: 254, or a nucleic acid sequence having 85%, 90%, 95%, 96%, 97%, 98% or 99% identity to or having one, two or three modifications (e.g., substitutions, e.g., conservative substitutions) but not more than 30, 20 or 10 modifications (e.g., substitutions, e.g., conservative substitutions) of an amino acid sequence of a nucleic acid sequence of SEQ ID NO: 114, SEQ ID NO: 115, SEQ ID NO: 116, SEQ ID NO: 117, SEQ ID NO: 118, SEQ ID NO: 119, SEQ ID NO: 120, SEQ ID NO: 121, SEQ ID NO: 122, SEQ ID NO: 123, SEQ ID NO: 124, SEQ ID NO: 125, SEQ ID NO: 126, SEQ ID NO: 127, SEQ ID NO: 128, SEQ ID NO: 234, SEQ ID NO: 235, SEQ ID NO: 236, SEQ ID NO: 237, SEQ ID NO: 238, SEQ ID NO: 239, SEQ ID NO: 240, SEQ ID NO: 241, SEQ ID NO: 242, SEQ ID NO: 243, SEQ ID NO: 244, SEQ ID NO: 245, SEQ ID NO: 246, SEQ ID NO: 247, SEQ ID NO: 248, SEQ ID NO: 249, SEQ ID NO: 250, SEQ ID NO: 251, SEQ ID NO: 252, SEQ ID NO: 253, or SEQ ID NO: 254.

[0026] In one aspect, the invention pertains to an isolated nucleic acid molecule encoding an anti-BCMA binding domain, wherein the anti-BCMA binding domain comprises one or more (e.g., all three) light chain complementary determining region 1 (LC CDR1), light chain complementary determining region 2 (LC CDR2), and/or light chain complementary determining region 3 (LC CDR3) of an anti-BCMA binding domain described herein, and one or more (e.g., all three) heavy chain complementary determining region 1 (HC CDR1), heavy chain complementary determining region 2 (HC CDR2), and/or heavy chain complementary determining region 3 (HC CDR3) of an anti-BCMA binding domain described herein, e.g., a human anti-BCMA binding domain comprising one or more, e.g., all three, LC CDRs and one or more, e.g., all three, HC CDRs. In one embodiment, the encoded anti-BCMA binding domain comprises a light chain variable region described herein (e.g., in SEQ ID NO: 84, 85, 86, 87, 88, 89, 90, 91, 92, 93, 94, 95, 96, 97, 98, 192, 193, 194, 195, 196, 197, 198, 199, 200, 201, 202, 203, 204, 205, 206, 207, 208, 209, 210, 211, 212, 259, 260, 261, or 262) and/or a heavy chain variable region described herein (e.g., in SEQ ID NO: 69, 70, 71, 72, 73, 74, 75, 76, 77, 78, 79, 81, 82, 83, 171, 172, 173, 174, 175, 176, 177, 178, 179, 180, 181, 182, 183, 184, 185, 186, 187, 188, 189, 190, 191, 255, 256, 257, or 258). In one embodiment, the encoded anti-BCMA binding domain is a scFv comprising a light chain and a heavy chain of an amino acid sequence of in SEQ ID NO: 39, SEQ ID NO: 40, SEQ ID NO: 41, SEQ ID NO: 42, SEQ ID NO: 43, SEQ ID NO: 44, SEQ ID NO: 45, SEQ ID NO: 46, SEQ ID NO: 47, SEQ ID NO: 48, SEQ ID NO: 49, SEQ ID NO: 50, SEQ ID NO: 51, SEQ ID NO: 52, SEQ ID NO: 53, SEQ ID NO: 129, SEQ ID NO: 130, SEQ ID NO: 131, SEQ ID NO: 132, SEQ ID NO: 133, SEQ ID NO: 134, SEQ ID NO: 135, SEQ ID NO: 136, SEQ ID NO: 137, SEQ ID NO: 138, SEQ ID NO: 139, SEQ ID NO: 140, SEQ ID NO: 141, SEQ ID NO: 142, SEQ ID NO: 143, SEQ ID NO: 144, SEQ ID NO: 145, SEQ ID NO: 146, SEQ ID NO: 147, SEQ ID NO: 148, SEQ ID NO: 149, SEQ ID NO: 263, SEQ ID NO: 264, SEQ ID NO: 265, or SEQ ID NO: 266, or a sequence with 95-99% identity thereof. In an embodiment, the anti-BCMA binding domain (e.g., an scFv) comprises: a light chain variable region comprising an amino acid sequence having at least one, two or three modifications (e.g., substitutions, e.g., conservative substitutions) but not more than 30, 20 or 10 modifications (e.g., substitutions, e.g., conservative substitutions) of an amino acid sequence of a light chain variable region provided in SEQ ID NO: 84, 85, 86, 87, 88, 89, 90, 91, 92, 93, 94, 95, 96, 97, 98, 192, 193, 194, 195, 196, 197, 198, 199, 200, 201, 202, 203, 204, 205, 206, 207, 208, 209, 210, 211, 212, 259, 260, 261, or 262 or a sequence with 95-99% identity with an amino acid sequence of SEQ ID NO: 84, 85, 86, 87, 88, 89, 90, 91, 92, 93, 94, 95, 96, 97, 98, 192, 193, 194, 195, 196, 197, 198, 199, 200, 201, 202, 203, 204, 205, 206, 207, 208, 209, 210, 211, 212, 259, 260, 261, or 262; and/or a heavy chain variable region comprising an amino acid sequence having at least one, two or three modifications (e.g., substitutions, e.g., conservative substitutions) but not more than 30, 20 or 10 modifications (e.g., substitutions, e.g., conservative substitutions) of an amino acid sequence of a heavy chain variable region provided in SEQ ID NO: 69, 70, 71, 72, 73, 74, 75, 76, 77, 78, 79, 81, 82, 83, 171, 172, 173, 174, 175, 176, 177, 178, 179, 180, 181, 182, 183, 184, 185, 186, 187, 188, 189, 190, 191, 255, 256, 257, or 258 or a sequence with 95-99% identity to an amino acid sequence in SEQ ID NO: 69, 70, 71, 72, 73, 74, 75, 76, 77, 78, 79, 81, 82, 83, 171, 172, 173, 174, 175, 176, 177, 178, 179, 180, 181, 182, 183, 184, 185, 186, 187, 188, 189, 190, 191, 255, 256, 257, or 258. In one embodiment, the anti-BCMA binding domain comprises a sequence selected from the group consisting of SEQ ID NO: 39, SEQ ID NO: 40, SEQ ID NO: 41, SEQ ID NO: 42, SEQ ID NO: 43, SEQ ID NO: 44, SEQ ID NO: 45, SEQ ID NO: 46, SEQ ID NO: 47, SEQ ID NO: 48, SEQ ID NO: 49, SEQ ID NO: 50, SEQ ID NO: 51, SEQ ID NO: 52, SEQ ID NO: 53, SEQ ID NO: 129, SEQ ID NO: 130, SEQ ID NO: 131, SEQ ID NO: 132, SEQ ID NO: 133, SEQ ID NO: 134, SEQ ID NO: 135, SEQ ID NO: 136, SEQ ID NO: 137, SEQ ID NO: 138, SEQ ID NO: 139, SEQ ID NO: 140, SEQ ID NO: 141, SEQ ID NO: 142, SEQ ID NO: 143, SEQ ID NO: 144, SEQ ID NO: 145, SEQ ID NO: 146, SEQ ID NO: 147, SEQ ID NO: 148, and SEQ ID NO: 149, SEQ ID NO: 263, SEQ ID NO: 264, SEQ ID NO: 265, or SEQ ID NO: 266, or a sequence with 95-99% identify thereof. In one embodiment, the encoded anti-BCMA binding domain is a scFv, and a light chain variable region comprising an amino acid sequence described herein, e.g., in Table 1 or 16, is attached to a heavy chain variable region comprising an amino acid sequence described herein, e.g., in Table 1 or 16, via a linker, e.g., a linker described herein. In one embodiment, the encoded anti-BCMA binding domain includes a (Gly₄-Ser)n linker, wherein n is 1, 2, 3, 4, 5, or 6, preferably 4 (SEQ ID NO: 26). The light chain variable region and heavy chain variable region of a scFv can be, e.g., in any of the following orientations: light chain variable region-linker-heavy chain variable region or heavy chain variable region-linker-light chain variable region. In one embodiment, the isolated nucleic acid sequence encoding the human anti-BCMA binding domain comprises a sequence selected from a group consisting of SEQ ID NO: 54, SEQ ID NO: 55, SEQ ID NO: 56, SEQ ID NO: 57, SEQ ID NO: 58, SEQ ID NO: 59, SEQ ID NO: 60, SEQ ID NO: 61, SEQ ID NO: 62, SEQ ID NO: 63, SEQ ID NO: 64, SEQ ID NO: 65, SEQ ID NO: 66, SEQ ID NO: 67, SEQ ID NO: 68, SEQ ID NO: 150, SEQ ID NO: 151, SEQ ID NO: 152, SEQ ID NO: 153, SEQ ID NO: 154, SEQ ID NO: 155, SEQ ID NO: 156, SEQ ID NO: 157, SEQ ID NO: 158, SEQ ID NO: 159, SEQ ID NO: 160, SEQ ID NO: 161, SEQ ID NO: 162, SEQ ID NO: 163, SEQ ID NO: 164, SEQ ID NO: 165, SEQ ID NO: 166, SEQ ID NO: 167, SEQ ID NO: 168, SEQ ID NO: 169, and SEQ ID NO: 170, or a sequence with 95-99% identity thereof.

[0027] In other embodiments, the encoded BCMA binding domain comprises a HC CDR1, a HC CDR2, and a HC CDR3 of any BCMA heavy chain binding domain amino acid sequences listed in Table 1 or 16. In embodiments, the BCMA binding domain further comprises a LC CDR1, a LC CDR2, and a LC CDR3. In embodiments, the BCMA binding domain comprises a LC CDR1, a LC CDR2, and a LC CDR3 of any BCMA light chain binding domain amino acid sequences listed in Table 1 or 16.

[0028] In some embodiments, the encoded BCMA binding domain comprises one, two or all of LC CDR1, LC CDR2, and LC CDR3 of any BCMA light chain binding domain amino acid sequences listed in Table 1 or 16, and one, two or all of HC CDR1, HC CDR2, and HC CDR3 of any BCMA heavy chain binding domain amino acid sequences listed in Table 1 or 16.

[0029] In an embodiment, the anti-BCMA binding domain (e.g., an scFv) comprises: a light chain variable region comprising an amino acid sequence comprising (or consisting of) a light chain variable region of SEQ ID NO: 271 or 273; and amino acid sequence having at least one, two or three modifications (e.g., substitutions, e.g., conservative substitutions) but not more than 30, 20 or 10 modifications (e.g., substitutions, e.g., conservative substitutions) of an amino acid sequence of a light chain variable region provided in SEQ ID NO: 271 or 273, or a sequence with 95-99% identify thereof; and/or a heavy chain variable region comprising an amino acid sequence comprising (or consisting of) a heavy chain variable region of SEQ ID NO: 271 or 273; and amino acid sequence having at least one, two or three modifications (e.g., substitutions, e.g., conservative substitutions) but not more than 30, 20 or 10 modifications (e.g., substitutions, e.g., conservative substitutions) of an amino acid sequence of a heavy chain variable region provided in SEQ ID NO: 271 or 273, or a sequence with 95-99% identify thereof. In one embodiment, the encoded humanized anti-BCMA binding domain is a scFv, and a light chain variable region comprising an amino acid sequence described herein, e.g., provided in SEQ ID NO: 271 or 273, is attached to a heavy chain variable region comprising an amino acid sequence described herein, e.g., provided in SEQ ID NO: 271 or 273, via a linker, e.g., a linker described herein. In one embodiment, the encoded anti-BCMA binding domain includes a (Gly₄-Ser)n linker, wherein n is 1, 2, 3, 4, 5, or 6, preferably 4 (SEQ ID NO: 26).

[0030] In another aspect, the invention pertains to an isolated polypeptide molecule, e.g., isolated chimeric antigen receptor (CAR) molecule, encoded by the nucleic acid molecule. In one embodiment, the isolated polypeptide molecule comprises a sequence selected from the group consisting of SEQ ID NO: 99, SEQ ID NO: 100, SEQ ID NO: 101, SEQ ID NO: 102, SEQ ID NO: 103, SEQ ID NO: 104, SEQ ID NO: 105, SEQ ID NO: 106, SEQ ID NO: 107, SEQ ID NO: 108, SEQ ID NO: 109, SEQ ID NO: 110, SEQ ID NO: 111, SEQ ID NO: 112, SEQ ID NO: 113, SEQ ID NO: 213, SEQ ID NO: 214, SEQ ID NO: 215, SEQ ID NO: 216, SEQ ID NO: 217, SEQ ID NO: 218, SEQ ID NO: 219, SEQ ID NO: 220, SEQ ID NO: 221, SEQ ID NO: 222, SEQ ID NO: 223, SEQ ID NO: 224, SEQ ID NO: 225, SEQ ID NO: 226, SEQ ID NO: 227, SEQ ID NO: 228, SEQ ID NO: 229, SEQ ID NO: 230, SEQ ID NO: 231, SEQ ID NO: 232, and SEQ ID NO: 233, or a sequence with 95-99% identify thereof.

[0031] In another aspect, the invention pertains to an isolated chimeric antigen receptor (CAR) molecule (e.g., polypeptide) comprising an anti-BCMA binding domain (e.g., a human or humanized antibody or antibody fragment that specifically binds to BCMA), a transmembrane domain, and an intracellular signaling domain (e.g., an intracellular signaling domain comprising a costimulatory domain and/or a primary signaling domain). In one embodiment, the CAR comprises an antibody or antibody fragment which includes an anti-BCMA binding domain described herein (e.g., a human antibody or antibody fragment that specifically binds to BCMA as described herein), a transmembrane domain described herein, and an intracellular signaling domain described herein (e.g., an intracellular signaling domain comprising a costimulatory domain and/or a primary signaling domain described herein).

[0032] In one embodiment, the anti-BCMA binding domain comprises one or more (e.g., all three) light chain complementary determining region 1 (LC CDR1), light chain complementary determining region 2 (LC CDR2), and light chain complementary determining region 3 (LC CDR3) of an anti-BCMA binding domain described herein, and one or more (e.g., all three) heavy chain complementary determining region 1 (HC CDR1), heavy chain complementary determining region 2 (HC CDR2), and heavy chain complementary determining region 3 (HC CDR3) of an anti-BCMA binding domain described herein, e.g., a human or humanized anti-BCMA binding domain comprising one or more, e.g., all three, LC CDRs and one or more, e.g., all three, HC CDRs. In one embodiment, the anti-BCMA binding domain comprises a light chain variable region described herein (e.g., in Table 1 or SEQ ID NO: 271 or 273) and/or a heavy chain variable region described herein (e.g., in Table 1 or SEQ ID NO: 271 or 273). In one embodiment, the anti-BCMA binding domain is a scFv comprising a light chain and a heavy chain of an amino acid sequence listed in Table 1, SEQ ID NO: 271 or 273. In an embodiment, the anti-BCMA binding domain (e.g., an scFv) comprises: a light chain variable region comprising an amino acid sequence having at least one, two or three modifications (e.g., substitutions, e.g., conservative substitutions) but not more than 30, 20 or 10 modifications (e.g., substitutions, e.g., conservative substitutions) of an amino acid sequence of a light chain variable region provided in Table 1 or SEQ ID NO: 271 or 273, or a sequence with 95-99% identity with an amino acid sequence provided in Table 1 or SEQ ID NO: 271 or 273; and/or a heavy chain variable region comprising an amino acid sequence having at least one, two or three modifications (e.g., substitutions, e.g., conservative substitutions) but not more than 30, 20 or 10 modifications (e.g., substitutions, e.g., conservative substitutions) of an amino acid sequence of a heavy chain variable region provided in Table 1 or SEQ ID NO: 271 or 273, or a sequence with 95-99% identity to an amino acid sequence provided in Table 1 or SEQ ID NO: 271 or 273. In one embodiment, the anti-BCMA binding domain comprises a sequence selected from a group consisting of SEQ ID NO: 39, SEQ ID NO: 40, SEQ ID NO: 41, SEQ ID NO: 42, SEQ ID NO: 43, SEQ ID NO: 44, SEQ ID NO: 45, SEQ ID NO: 46, SEQ ID NO: 47, SEQ ID NO: 48, SEQ ID NO: 49, SEQ ID NO: 50, SEQ ID NO: 51, SEQ ID NO: 52, SEQ ID NO: 53, SEQ ID NO: 129, SEQ ID NO: 130, SEQ ID NO: 131, SEQ ID NO: 132, SEQ ID NO: 133, SEQ ID NO: 134, SEQ ID NO: 135, SEQ ID NO: 136, SEQ ID NO: 137, SEQ ID NO: 138, SEQ ID NO: 139, SEQ ID NO: 140, SEQ ID NO: 141, SEQ ID NO: 142, SEQ ID NO: 143, SEQ ID NO: 144, SEQ ID NO: 145, SEQ ID NO: 146, SEQ ID NO: 147, SEQ ID NO: 148, SEQ ID NO: 149, SEQ ID NO: 263, SEQ ID NO: 264, SEQ ID NO: 265, or SEQ ID NO: 266; or an amino acid sequence having at least one, two or three modifications (e.g., substitutions, e.g., conservative substitutions) but not more than 30, 20 or 10 modifications (e.g., substitutions, e.g., conservative substitutions) to any of the aforesaid sequences; or a sequence with 95-99% identify to any of the aforesaid sequences. In one embodiment, the anti-BCMA binding domain comprises a sequence selected from a group consisting of SEQ ID NO: 271 or SEQ ID NO: 273, or a sequence with 95-99% identify thereof. In one embodiment, the anti-BCMA binding domain is a scFv, and a light chain variable region comprising an amino acid sequence described herein, e.g., in Table 1 or 16, SEQ ID NO: 271 or SEQ ID NO: 273, is attached to a heavy chain variable region comprising an amino acid sequence described herein, e.g., in Table 1 or 16, SEQ ID NO: 271 or SEQ ID NO: 273, via a linker, e.g., a linker described herein. In one embodiment, the anti-BCMA binding domain includes a (Gly₄-Ser)n linker, wherein n is 1, 2, 3, 4, 5, or 6, preferably 4 (SEQ ID NO: 26). The light chain variable region and heavy chain variable region of a scFv can be, e.g., in any of the following orientations: light chain variable region-linker-heavy chain variable region or heavy chain variable region-linker-light chain variable region.

[0033] In other embodiments, the BCMA binding domain comprises a HC CDR1, a HC CDR2, and a HC CDR3 of any BCMA heavy chain binding domain amino acid sequences listed in Table 1 or 16. In embodiments, the BCMA binding domain further comprises a LC CDR1, a LC CDR2, and a LC CDR3. In embodiments, the BCMA binding domain comprises a LC CDR1, a LC CDR2, and a LC CDR3 of any BCMA light chain binding domain amino acid sequences listed in Table 1 or 16.

[0034] In some embodiments, the BCMA binding domain comprises one, two or all of LC CDR1, LC CDR2, and LC CDR3 of any BCMA light chain binding domain amino acid sequences listed in Table 1 or 16, and one, two or all of HC CDR1, HC CDR2, and HC CDR3 of any BCMA heavy chain binding domain amino acid sequences listed in Table 1 or 16.

[0035] In one embodiment, the isolated CAR molecule comprises a transmembrane domain of a protein, e.g., described herein, e.g., selected from the group consisting of the alpha, beta or zeta chain of the T-cell receptor, CD28, CD3 epsilon, CD45, CD4, CD5, CD8, CD9, CD16, CD22, CD33, CD37, CD64, CD80, CD86, CD134, CD137 and CD154. In one embodiment, the transmembrane domain comprises a sequence of SEQ ID NO: 6. In one embodiment, the transmembrane domain comprises an amino acid sequence having at least one, two or three modifications (e.g., substitutions, e.g., conservative substitutions) but not more than 20, 10 or 5 modifications (e.g., substitutions, e.g., conservative substitutions) of an amino acid sequence of SEQ ID NO: 6, or a sequence with 95-99% identity to an amino acid sequence of SEQ ID NO: 6.

[0036] In one embodiment, the anti-BCMA binding domain is connected to the transmembrane domain by a hinge region, e.g., a hinge region described herein. In one embodiment, the encoded hinge region comprises SEQ ID NO:2, or a sequence with 95-99% identity thereof.

[0037] In one embodiment, the isolated CAR molecule further comprises a sequence encoding a costimulatory domain, e.g., a costimulatory domain described herein. In embodiments, the intracellular signaling domain of the isolated CAR molecule comprises a costimulatory domain. In embodiments, the intracellular signaling domain of the isolated CAR molecule comprises a primary signaling domain. In embodiments, the intracellular signaling domain of the isolated CAR molecule comprises a costimulatory domain and a primary signaling domain.

[0038] In one embodiment, the costimulatory domain comprises a functional signaling domain of a protein selected from the group consisting of MHC class I molecule, TNF receptor proteins, Immunoglobulin-like proteins, cytokine receptors, integrins, signaling lymphocytic activation molecules (SLAM proteins), activating NK cell receptors, BTLA, a Toll ligand receptor, OX40, CD2, CD7, CD27, CD28, CD30, CD40, CDS, ICAM-1, LFA-1 (CD11a/CD18), 4-1BB (CD137), B7-H3, CDS, ICAM-1, ICOS (CD278), GITR, BAFFR, LIGHT, HVEM (LIGHTR), KIRDS2, SLAMF7, NKp80 (KLRF1), NKp44, NKp30, NKp46, CD19, CD4, CD8alpha, CD8beta, IL2R beta, IL2R gamma, IL7R alpha, ITGA4, VLA1, CD49a, ITGA4, IA4, CD49D, ITGA6, VLA-6, CD49f, ITGAD, CD11d, ITGAE, CD103, ITGAL, CD11a, LFA-1, ITGAM, CD11b, ITGAX, CD11c, ITGB1, CD29, ITGB2, CD18, LFA-1, ITGB7, NKG2D, NKG2C, TNFR2, TRANCE/RANKL, DNAM1 (CD226), SLAMF4 (CD244, 2B4), CD84, CD96 (Tactile), CEACAM1, CRTAM, Ly9 (CD229), CD160 (BY55), PSGL1, CD100 (SEMA4D), CD69, SLAMF6 (NTB-A, Ly108), SLAM (SLAMF1, CD150, IPO-3), BLAME (SLAMF8), SELPLG (CD162), LTBR, LAT, GADS, SLP-76, PAG/Cbp, CD19a, and a ligand that specifically binds with CD83.

[0039] In one embodiment, the costimulatory domain comprises a sequence of SEQ ID NO:7. In one embodiment, the costimulatory domain comprises an amino acid sequence having at least one, two or three modifications (e.g., substitutions, e.g., conservative substitutions) but not more than 20, 10 or 5 modifications (e.g., substitutions, e.g., conservative substitutions) of an amino acid sequence of SEQ ID NO:7, or a sequence with 95-99% identity to an amino acid sequence of SEQ ID NO:7. In another embodiment, the costimulatory domain of CD28 comprises the amino acid sequence of SEQ ID NO:1104. In one embodiment, the costimulatory domain comprises an amino acid sequence having at least one, two or three modifications but not more than 20, 10 or 5 modifications of an amino acid sequence of SEQ ID NO:1104, or a sequence with 95-99% identity to an amino acid sequence of SEQ ID NO:1104. In another embodiment, the costimulatory domain of CD27 comprises the amino acid sequence of SEQ ID NO:8. In one embodiment, the costimulatory domain comprises an amino acid sequence having at least one, two or three modifications but not more than 20, 10 or 5 modifications of an amino acid sequence of SEQ ID NO:8, or a sequence with 95-99% identity to an amino acid sequence of SEQ ID NO:8. In another embodiment, the costimulatory domain of ICOS comprises the amino acid sequence of SEQ ID NO:1106. In one embodiment, the costimulatory domain comprises an amino acid sequence having at least one, two or three modifications but not more than 20, 10 or 5 modifications of an amino acid sequence of SEQ ID NO:1106, or a sequence with 95-99% identity to an amino acid sequence of SEQ ID NO:1106.

[0040] In embodiments, the primary signaling domain comprises a signaling domain or CD3 zeta. In embodiments, the functional signaling domain of CD3 zeta comprises SEQ ID NO: 9 (mutant CD3 zeta) or SEQ ID NO: 10 (wild type human CD3 zeta), or a sequence with 95-99% identity thereof.

[0041] In one embodiment, the intracellular signaling domain comprises a functional signaling domain of 4-1BB and/or a functional signaling domain of CD3 zeta. In one embodiment, the intracellular signaling domain comprises the sequence of SEQ ID NO: 7 and/or the sequence of SEQ ID NO:9 or SEQ ID NO:10. In one embodiment, the intracellular signaling domain comprises an amino acid sequence having at least one, two or three modifications (e.g., substitutions, e.g., conservative substitutions) but not more than 20, 10 or 5 modifications (e.g., substitutions, e.g., conservative substitutions) of an amino acid sequence of SEQ ID NO: 7 and/or the sequence of SEQ ID NO:9 or SEQ ID NO:10, or a sequence with 95-99% identity to an amino acid sequence of SEQ ID NO: 7 and/or the sequence of SEQ ID NO:9 or SEQ ID NO:10. In one embodiment, the intracellular signaling domain comprises the sequence of SEQ ID NO: 7 and/or the sequence of SEQ ID NO:9 or SEQ ID NO:10, wherein the sequences comprising the intracellular signaling domain are expressed in the same frame and as a single polypeptide chain.

[0042] In one embodiment, the intracellular signaling domain comprises a functional signaling domain of CD27 and/or a functional signaling domain of CD3 zeta. In one embodiment, the intracellular signaling domain of CD27 comprises the amino acid sequence of SEQ ID NO: 8 and/or the CD3 zeta amino acid sequence of SEQ ID NO:9 or SEQ ID NO:10. In one embodiment, the intracellular signaling domain comprises an amino acid sequence having at least one, two or three modifications but not more than 20, 10 or 5 modifications of an amino acid sequence of SEQ ID NO:8 and/or an amino acid sequence of SEQ ID NO:9 or SEQ ID NO:10, or a sequence with 95-99% identity to an amino acid sequence of SEQ ID NO:8 and/or an amino acid sequence of SEQ ID NO:9 or SEQ ID NO:10. In one embodiment, the intracellular signaling domain comprises the sequence of SEQ ID NO:8 and the sequence of SEQ ID NO:9 or SEQ ID NO:10, wherein the sequences comprising the intracellular signaling domain are expressed in the same frame and as a single polypeptide chain.

[0043] In one embodiment, the intracellular signaling domain comprises a functional signaling domain of CD28 and/or a functional signaling domain of CD3 zeta. In one embodiment, the encoded intracellular signaling domain of CD28 comprises the amino acid sequence of SEQ ID NO: 1104 and/or the CD3 zeta amino acid sequence of SEQ ID NO:9 or SEQ ID NO:10. In one embodiment, the intracellular signaling domain comprises an amino acid sequence having at least one, two or three modifications but not more than 20, 10 or 5 modifications of an amino acid sequence of SEQ ID NO: 1104 and/or an amino acid sequence of SEQ ID NO:9 or SEQ ID NO:10, or a sequence with 95-99% identity to an amino acid sequence of SEQ ID NO: 379 and/or an amino acid sequence of SEQ ID NO:9 or SEQ ID NO:10. In one embodiment, the intracellular signaling domain comprises the sequence of SEQ ID NO: 1104 and the sequence of SEQ ID NO:9 or SEQ ID NO:10, wherein the sequences comprising the intracellular signaling domain are expressed in the same frame and as a single polypeptide chain.

[0044] In one embodiment, the intracellular signaling domain comprises a functional signaling domain of ICOS and/or a functional signaling domain of CD3 zeta. In one embodiment, the intracellular signaling domain of ICOS comprises the amino acid sequence of SEQ ID NO: 1106 and/or the CD3 zeta amino acid sequence of SEQ ID NO:9 or SEQ ID NO:10. In one embodiment, the intracellular signaling domain comprises an amino acid sequence having at least one, two or three modifications but not more than 20, 10 or 5 modifications of an amino acid sequence of SEQ ID NO:1106 and/or an amino acid sequence of SEQ ID NO:9 or SEQ ID NO:10, or a sequence with 95-99% identity to an amino acid sequence of SEQ ID NO:1106 and/or an amino acid sequence of SEQ ID NO:9 or SEQ ID NO:10. In one embodiment, the encoded intracellular signaling domain comprises the sequence of SEQ ID NO:1106 and the sequence of SEQ ID NO:9 or SEQ ID NO:10, wherein the sequences comprising the intracellular signaling domain are expressed in the same frame and as a single polypeptide chain.

[0045] In one embodiment, the isolated CAR molecule further comprises a leader sequence, e.g., a leader sequence described herein. In one embodiment, the leader sequence comprises an amino acid sequence of SEQ ID NO: 1, or a sequence with 95-99% identity to an amino acid sequence of SEQ ID NO:1

[0046] In another aspect, the invention pertains to an isolated CAR molecule comprising a leader sequence, e.g., a leader sequence described herein, e.g., a leader sequence of SEQ ID NO: 1, or having 95-99% identity thereof, an anti-BCMA binding domain described herein, e.g., an anti-BCMA binding domain comprising a LC CDR1, a LC CDR2, a LC CDR3, a HC CDR1, a HC CDR2 and a HC CDR3 described herein, e.g., an anti-BCMA binding domain described in Table 1 or 16, SEQ ID NO: 271 or SEQ ID NO: 273, or a sequence with 95-99% identify thereof, a hinge region, e.g., a hinge region described herein, e.g., a hinge region of SEQ ID NO:2, or having 95-99% identity thereof, a transmembrane domain, e.g., a transmembrane domain described herein, e.g., a transmembrane domain having a sequence of SEQ ID NO: 6 or a sequence having 95-99% identity thereof, an intracellular signaling domain, e.g., an intracellular signaling domain described herein (e.g., an intracellular signaling domain comprising a costimulatory domain and/or a primary signaling domain). In one embodiment, the intracellular signaling domain comprises a costimulatory domain, e.g., a costimulatory domain described herein, e.g., a 4-1BB costimulatory domain having a sequence of SEQ ID NO:7, or having 95-99% identity thereof, and/or a primary signaling domain, e.g., a primary signaling domain described herein, e.g., a CD3 zeta stimulatory domain having a sequence of SEQ ID NO:9 or SEQ ID NO:10, or having 95-99% identity thereof. In one embodiment, the intracellular signaling domain comprises a costimulatory domain, e.g., a costimulatory domain described herein, e.g., a 4-1BB costimulatory domain having a sequence of SEQ ID NO:7, and/or a primary signaling domain, e.g., a primary signaling domain described herein, e.g., a CD3 zeta stimulatory domain having a sequence of SEQ ID NO:9 or SEQ ID NO:10.

[0047] In one embodiment, the isolated CAR molecule comprises (e.g., consists of) an amino acid sequence of SEQ ID NO: 99, SEQ ID NO: 100, SEQ ID NO: 101, SEQ ID NO: 102, SEQ ID NO: 103, SEQ ID NO: 104, SEQ ID NO: 105, SEQ ID NO: 106, SEQ ID NO: 107, SEQ ID NO: 108, SEQ ID NO: 109, SEQ ID NO: 110, SEQ ID NO: 111, SEQ ID NO: 112, SEQ ID NO: 113, SEQ ID NO: 213, SEQ ID NO: 214, SEQ ID NO: 215, SEQ ID NO: 216, SEQ ID NO: 217, SEQ ID NO: 218, SEQ ID NO: 219, SEQ ID NO: 220, SEQ ID NO: 221, SEQ ID NO: 222, SEQ ID NO: 223, SEQ ID NO: 224, SEQ ID NO: 225, SEQ ID NO: 226, SEQ ID NO: 227, SEQ ID NO: 228, SEQ ID NO: 229, SEQ ID NO: 230, SEQ ID NO: 231, SEQ ID NO: 232, or SEQ ID NO: 233, or an amino acid sequence having at least one, two, three, four, five, 10, 15, 20 or 30 modifications (e.g., substitutions, e.g., conservative substitutions) but not more than 60, 50 or 40 modifications (e.g., substitutions, e.g., conservative substitutions) of an amino acid sequence of SEQ ID NO: 99, SEQ ID NO: 100, SEQ ID NO: 101, SEQ ID NO: 102, SEQ ID NO: 103, SEQ ID NO: 104, SEQ ID NO: 105, SEQ ID NO: 106, SEQ ID NO: 107, SEQ ID NO: 108, SEQ ID NO: 109, SEQ ID NO: 110, SEQ ID NO: 111, SEQ ID NO: 112, SEQ ID NO: 113, SEQ ID NO: 213, SEQ ID NO: 214, SEQ ID NO: 215, SEQ ID NO: 216, SEQ ID NO: 217, SEQ ID NO: 218, SEQ ID NO: 219, SEQ ID NO: 220, SEQ ID NO: 221, SEQ ID NO: 222, SEQ ID NO: 223, SEQ ID NO: 224, SEQ ID NO: 225, SEQ ID NO: 226, SEQ ID NO: 227, SEQ ID NO: 228, SEQ ID NO: 229, SEQ ID NO: 230, SEQ ID NO: 231, SEQ ID NO: 232, or SEQ ID NO: 233, or an amino acid sequence having 85%, 90%, 95%, 96%, 97%, 98% or 99% identity to an amino acid sequence of SEQ ID NO: 99, SEQ ID NO: 100, SEQ ID NO: 101, SEQ ID NO: 102, SEQ ID NO: 103, SEQ ID NO: 104, SEQ ID NO: 105, SEQ ID NO: 106, SEQ ID NO: 107, SEQ ID NO: 108, SEQ ID NO: 109, SEQ ID NO: 110, SEQ ID NO: 111, SEQ ID NO: 112, SEQ ID NO: 113, SEQ ID NO: 213, SEQ ID NO: 214, SEQ ID NO: 215, SEQ ID NO: 216, SEQ ID NO: 217, SEQ ID NO: 218, SEQ ID NO: 219, SEQ ID NO: 220, SEQ ID NO: 221, SEQ ID NO: 222, SEQ ID NO: 223, SEQ ID NO: 224, SEQ ID NO: 225, SEQ ID NO: 226, SEQ ID NO: 227, SEQ ID NO: 228, SEQ ID NO: 229, SEQ ID NO: 230, SEQ ID NO: 231, SEQ ID NO: 232, or SEQ ID NO: 233.

[0048] In other embodiments, the anti-BCMA binding domain comprises a HC CDR1, a HC CDR2, and a HC CDR3 of any BCMA heavy chain binding domain amino acid sequences listed in Table 1 or 16. In embodiments, the BCMA binding domain further comprises a LC CDR1, a LC CDR2, and a LC CDR3. In embodiments, the BCMA binding domain comprises a LC CDR1, a LC CDR2, and a LC CDR3 of any BCMA light chain binding domain amino acid sequences listed in Table for 16.

[0049] In some embodiments, the anti-BCMA binding domain comprises one, two or all of LC CDR1, LC CDR2, and LC CDR3 of any BCMA light chain binding domain amino acid sequences listed in Table 1 or 16, and one, two or all of HC CDR1, HC CDR2, and HC CDR3 of any BCMA heavy chain binding domain amino acid sequences listed in Table 1 or 16.

[0050] In one aspect, the invention pertains to a BCMA binding domain comprising one or more (e.g., all three) light chain complementary determining region 1 (LC CDR1), light chain complementary determining region 2 (LC CDR2), and light chain complementary determining region 3 (LC CDR3) of a BCMA binding domain described herein, and/or one or more (e.g., all three) heavy chain complementary determining region 1 (HC CDR1), heavy chain complementary determining region 2 (HC CDR2), and heavy chain complementary determining region 3 (HC CDR3) of a BCMA binding domain described herein, e.g., a BCMA binding domain comprising one or more, e.g., all three, LC CDRs and one or more, e.g., all three, HC CDRs.

[0051] In other embodiments, the BCMA binding domain comprises a HC CDR1, a HC CDR2, and a HC CDR3 of any BCMA heavy chain binding domain amino acid sequences listed in Table 1 or 16. In embodiments, the BCMA binding domain further comprises a LC CDR1, a LC CDR2, and a LC CDR3. In embodiments, the BCMA binding domain comprises a LC CDR1, a LC CDR2, and a LC CDR3 of any BCMA light chain binding domain amino acid sequences listed in Table 1 or 16.

[0052] In some embodiments, the BCMA binding domain comprises one, two or all of LC CDR1, LC CDR2, and LC CDR3 of any BCMA light chain binding domain amino acid sequences listed in Table 1 or 16, and one, two or all of HC CDR1, HC CDR2, and HC CDR3 of any BCMA heavy chain binding domain amino acid sequences listed in Table 1 or 16.

[0053] In one embodiment, the BCMA binding domain comprises one or more (e.g., all three) light chain complementary determining region 1 (LC CDR1), light chain complementary determining region 2 (LC CDR2), and light chain complementary determining region 3 (LC CDR3) of an BCMA binding domain described herein, and one or more (e.g., all three) heavy chain complementary determining region 1 (HC CDR1), heavy chain complementary determining region 2 (HC CDR2), and heavy chain complementary determining region 3 (HC CDR3) of an BCMA binding domain described herein, e.g., a human or humanized anti-BCMA binding domain comprising one or more, e.g., all three, LC CDRs and one or more, e.g., all three, HC CDRs. In one embodiment, the BCMA binding domain comprises a light chain variable region described herein (e.g., in Table 1 or SEQ ID NO: 271 or 273) and/or a heavy chain variable region described herein (e.g., in Table 1 or SEQ ID NO: 271 or 273). In one embodiment, the BCMA binding domain is a scFv comprising a light chain and a heavy chain of an amino acid sequence listed in Table 1, SEQ ID NO: 271 or 273. In an embodiment, the BCMA binding domain (e.g., an scFv) comprises: a light chain variable region comprising an amino acid sequence having at least one, two or three modifications (e.g., substitutions, e.g., conservative substitutions) but not more than 30, 20 or 10 modifications (e.g., substitutions, e.g., conservative substitutions) of an amino acid sequence of a light chain variable region provided in Table 1 or SEQ ID NO: 271 or 273, or a sequence with 95-99% identity with an amino acid sequence provided in Table 1 or SEQ ID NO: 271 or 273; and/or a heavy chain variable region comprising an amino acid sequence having at least one, two or three modifications (e.g., substitutions, e.g., conservative substitutions) but not more than 30, 20 or 10 modifications (e.g., substitutions, e.g., conservative substitutions) of an amino acid sequence of a heavy chain variable region provided in Table 1 or SEQ ID NO: 271 or 273, or a sequence with 95-99% identity to an amino acid sequence provided in Table 1 or SEQ ID NO: 271 or 273. In one embodiment, the BCMA binding domain comprises a sequence selected from a group consisting of SEQ ID NO: 39, SEQ ID NO: 40, SEQ ID NO: 41, SEQ ID NO: 42, SEQ ID NO: 43, SEQ ID NO: 44, SEQ ID NO: 45, SEQ ID NO: 46, SEQ ID NO: 47, SEQ ID NO: 48, SEQ ID NO: 49, SEQ ID NO: 50, SEQ ID NO: 51, SEQ ID NO: 52, SEQ ID NO: 53, SEQ ID NO: 129, SEQ ID NO: 130, SEQ ID NO: 131, SEQ ID NO: 132, SEQ ID NO: 133, SEQ ID NO: 134, SEQ ID NO: 135, SEQ ID NO: 136, SEQ ID NO: 137, SEQ ID NO: 138, SEQ ID NO: 139, SEQ ID NO: 140, SEQ ID NO: 141, SEQ ID NO: 142, SEQ ID NO: 143, SEQ ID NO: 144, SEQ ID NO: 145, SEQ ID NO: 146, SEQ ID NO: 147, SEQ ID NO: 148, SEQ ID NO: 149, SEQ ID NO: 263, SEQ ID NO: 264, SEQ ID NO: 265, or SEQ ID NO: 266; or an amino acid sequence having at least one, two or three modifications (e.g., substitutions, e.g., conservative substitutions) but not more than 30, 20 or 10 modifications (e.g., substitutions, e.g., conservative substitutions) to any of the aforesaid sequences; or a sequence with 95-99% identify to any of the aforesaid sequences. In one embodiment, the BCMA binding domain comprises a sequence selected from a group consisting of SEQ ID NO: 271 or SEQ ID NO: 273, or a sequence with 95-99% identify thereof. In one embodiment, the anti-BCMA binding domain is a scFv, and a light chain variable region comprising an amino acid sequence described herein, e.g., in Table 1 or 16, SEQ ID NO: 271 or SEQ ID NO: 273, is attached to a heavy chain variable region comprising an amino acid sequence described herein, e.g., in Table 1 or 16, SEQ ID NO: 271 or SEQ ID NO: 273, via a linker, e.g., a linker described herein. In one embodiment, the BCMA binding domain includes a (Gly₄-Ser)n linker, wherein n is 1, 2, 3, 4, 5, or 6, preferably 4 (SEQ ID NO: 26). The light chain variable region and heavy chain variable region of a scFv can be, e.g., in any of the following orientations: light chain variable region-linker-heavy chain variable region or heavy chain variable region-linker-light chain variable region.

[0054] In another aspect, the invention pertains to a vector comprising a nucleic acid molecule described herein, e.g., a nucleic acid molecule encoding a CAR described herein. In one embodiment, the vector is selected from the group consisting of a DNA, a RNA, a plasmid, a lentivirus vector, adenoviral vector, or a retrovirus vector.

[0055] In one embodiment, the vector is a lentivirus vector. In one embodiment, the vector further comprises a promoter. In one embodiment, the promoter is an EF-1 promoter. In one embodiment, the EF-1 promoter comprises a sequence of SEQ ID NO: 11. In another embodiment, the promoter is a PGK promoter, e.g., a truncated PGK promoter as described herein.

[0056] In one embodiment, the vector is an in vitro transcribed vector, e.g., a vector that transcribes RNA of a nucleic acid molecule described herein. In one embodiment, the nucleic acid sequence in the vector further comprises a poly(A) tail, e.g., a poly A tail described herein, e.g., comprising about 150 adenosine bases (SEQ ID NO: 382). In one embodiment, the nucleic acid sequence in the vector further comprises a 3′UTR, e.g., a 3′ UTR described herein, e.g., comprising at least one repeat of a 3′UTR derived from human beta-globulin. In one embodiment, the nucleic acid sequence in the vector further comprises promoter, e.g., a T2A promoter.

[0057] In another aspect, the invention pertains to a cell comprising a vector described herein. In one embodiment, the cell is a cell described herein, e.g., an immune effector cell, e.g., a human T cell or a human NK cell, e.g., a human T cell described herein or a human NK cell described herein. In one embodiment, the human T cell is a CD8+ T cell.

[0058] In another embodiment, the CAR-expressing cell described herein can further express another agent, e.g., an agent which enhances the activity of a CAR-expressing cell. For example, in one embodiment, the agent can be an agent which inhibits an inhibitory molecule. Examples of inhibitory molecules include PD1, PD-L1, PD-L2, CTLA4, TIM3, CEACAM (e.g., CEACAM-1, CEACAM-3 and/or CEACAM-5), LAG3, VISTA, BTLA, TIGIT, LAIR1, CD160, 2B4, CD80, CD86, B7-H3 (CD276), B7-H4 (VTCN1), HVEM (TNFRSF14 or CD270), KIR, A2aR, MHC class I, MHC class II, GAL9, adenosine, and TGFR beta. In embodiments, the agent is an agent that inhibits PD1. In embodiments, the agent is an agent that inhibits PD-L1. In one embodiment, the agent which inhibits an inhibitory molecule can be an agent described herein, such as, e.g., an agent that comprises a first polypeptide, e.g., an inhibitory molecule, associated with a second polypeptide that provides a positive signal to the cell, e.g., an intracellular signaling domain described herein. In one embodiment, the agent comprises a first polypeptide, e.g., of an inhibitory molecule such as PD1, PD-L1, PD-L2, LAG3, CEACAM (e.g., CEACAM-1, CEACAM-3 and/or CEACAM-5), CTLA4, VISTA, CD160, BTLA, LAIR1, TIM3, 2B4, TGFR beta, CD80, CD86, B7-H3 (CD276), B7-H4 (VTCN1), HVEM (TNFRSF14 or CD270), KIR, A2aR, MHC class I, MHC class II, GAL9, adenosine, and TIGIT, or a fragment of any of these (e.g., at least a portion of the extracellular domain of any of these), and a second polypeptide which is an intracellular signaling domain described herein (e.g., comprising a costimulatory domain (e.g., 41BB, CD27 or CD28, e.g., as described herein) and/or a primary signaling domain (e.g., a CD3 zeta signaling domain described herein). In one embodiment, the agent comprises a first polypeptide of PD1 or a fragment thereof (e.g., at least a portion of the extracellular domain of PD1), and a second polypeptide of an intracellular signaling domain described herein (e.g., a CD28 signaling domain described herein and/or a CD3 zeta signaling domain described herein).

[0059] In another aspect, the invention pertains to a method of making a cell comprising transducing a cell described herein, e.g., an immune effector cell described herein, e.g., a T cell or NK cell described herein, with a vector of comprising a nucleic acid encoding a CAR, e.g., a CAR described herein.

[0060] The present invention also provides a method of generating a population of RNA-engineered cells, e.g., cells described herein, e.g., immune effector cells, e.g., T cells or NK cells, transiently expressing exogenous RNA. The method comprises introducing an in vitro transcribed RNA or synthetic RNA into a cell, where the RNA comprises a nucleic acid encoding a CAR molecule described herein.

[0061] In another aspect, the invention pertains to a method of providing an anti-tumor immunity in a mammal comprising administering to the mammal an effective amount of a cell expressing a CAR molecule, e.g., a cell expressing a CAR molecule described herein. In one embodiment, the cell is an autologous immune effector cell, e.g., T cell or an autologous NK cell. In one embodiment, the cell is an immune effector cell, e.g., allogeneic T cell or an allogeneic NK cell. In one embodiment, the mammal is a human, e.g., a patient with a hematologic cancer.

[0062] In another aspect, the invention pertains to a method of treating a mammal having a disease associated with expression of BCMA (e.g., a proliferative disease, a precancerous condition, and a noncancer related indication associated with the expression of BCMA) comprising administering to the mammal an effective amount of the cells expressing a CAR molecule, e.g., a CAR molecule described herein. In one embodiment, the mammal is a human, e.g., a patient with a hematologic cancer.

[0063] In one embodiment, the disease is a disease described herein. In one embodiment, the disease associated with BCMA expression is selected from a hematologic cancer such as acute leukemias including but not limited to acute myeloid leukemia (AML); myelodysplastic syndrome; myeloproliferative neoplasms; chronic myeloid leukemia (CML); Blastic plasmacytoid dendritic cell neoplasm; and to disease associated with BCMA expression including, but not limited to atypical and/or non-classical cancers, malignancies, precancerous conditions or proliferative diseases expressing BCMA; and combinations thereof. In one embodiment, the disease associated with BCMA expression is a hematologic cancer selected from the group consisting of one or more acute leukemias including but not limited to B-cell acute lymphoid leukemia (“BALL”), T-cell acute lymphoid leukemia (“TALL”), acute lymphoid leukemia (ALL); one or more chronic leukemias including but not limited to chronic myelogenous leukemia (CML), chronic lymphocytic leukemia (CLL); additional hematologic cancers or hematologic conditions including, but not limited to B cell prolymphocytic leukemia, blastic plasmacytoid dendritic cell neoplasm, Burkitt's lymphoma, diffuse large B cell lymphoma, follicular lymphoma, hairy cell leukemia, small cell- or a large cell-follicular lymphoma, malignant lymphoproliferative conditions, MALT lymphoma, mantle cell lymphoma, Marginal zone lymphoma, multiple myeloma, myelodysplasia and myelodysplastic syndrome, non-Hodgkin's lymphoma, plasmablastic lymphoma, plasmacytoid dendritic cell neoplasm, Waldenstrom macroglobulinemia, and “preleukemia” which are a diverse collection of hematological conditions united by ineffective production (or dysplasia) of myeloid blood cells, and to disease associated with BCMA expression include, but not limited to atypical and/or non-classical cancers, malignancies, precancerous conditions or proliferative diseases expressing BCMA; and combinations thereof.

[0064] In embodiments, a disease associated with expression of BCMA includes a plasma cell proliferative disorder, e.g., asymptomatic myeloma (smoldering multiple myeloma or indolent myeloma), monoclonal gammapathy of undetermined significance (MGUS), Waldenstrom's macroglobulinemia, plasmacytomas (e.g., plasma cell dyscrasia, solitary myeloma, solitary plasmacytoma, extramedullary plasmacytoma, and multiple plasmacytoma), systemic amyloid light chain amyloidosis, and POEMS syndrome (also known as Crow-Fukase syndrome, Takatsuki disease, and PEP syndrome).

[0065] In embodiments, a disease associated with expression of BCMA includes a cancer, e.g., a cancer described herein, e.g., a prostate cancer (e.g., castrate-resistant or therapy-resistant prostate cancer, or metastatic prostate cancer), pancreatic cancer, or lung cancer.

[0066] In one embodiment of the therapeutic methods, the cell expressing a CAR molecule described herein (e.g., a BCMA CAR molecule) is administered in combination with a cell comprising a CD19 CAR molecule. In one embodiment, the cell expressing the BCMA CAR molecule is administered before, subsequent to, or simultaneously with administration of the cell expressing the CD19 CAR. In one embodiment, the cell expressing the BCMA CAR molecule and the cell expressing the CD19 CAR molecule are part of a single composition, and in other embodiments the cell expressing the BCMA CAR molecule and the cell expressing the CD19 CAR molecule are part of separate compositions. In one embodiment, the cell expressing a CAR molecule described herein (e.g., a BCMA CAR molecule) also express a CD19 CAR molecule. In one embodiment, the disease associated with BCMA is multiple myeloma, e.g., CD19-negative multiple myeloma. In one embodiment, the disease associated with expression of BCMA is multiple myeloma e.g., a multiple myeloma that is CD19-negative, e.g., having a vast majority (e.g., 99.95%) of the neoplastic plasma cells with a CD19-negative phenotype, e.g., as detected by both flow cytometry and RT-PCR.

[0067] In one embodiment, the cells expressing a CAR molecule, e.g., a CAR molecule described herein, are administered in combination with an agent that increases the efficacy of a cell expressing a CAR molecule, e.g., an agent described herein.

[0068] In one embodiment, the cells expressing a CAR molecule, e.g., a CAR molecule described herein, are administered in combination with a low, immune enhancing dose of an mTOR inhibitor. While not wishing to be bound by theory, it is believed that treatment with a low, immune enhancing, dose (e.g., a dose that is insufficient to completely suppress the immune system but sufficient to improve immune function) is accompanied by a decrease in PD-1 positive immune effector cells, e.g., T cells or NK cells, or an increase in PD-1 negative cells. PD-1 positive immune effector cells, e.g., T cells or NK cells, but not PD-1 negative immune effector cells (e.g., T cells or NK cells), can be exhausted by engagement with cells which express a PD-1 ligand, e.g., PD-L1 or PD-L2.

[0069] In an embodiment this approach can be used to optimize the performance of CAR cells described herein in the subject. While not wishing to be bound by theory, it is believed that, in an embodiment, the performance of endogenous, non-modified immune effector cells, e.g., T cells or NK cells, is improved. While not wishing to be bound by theory, it is believed that, in an embodiment, the performance of a BCMA CAR expressing cell is improved. In other embodiments, cells, e.g., immune effector cells (e.g., T cells or NK cells), which have, or will be engineered to express a CAR, can be treated ex vivo by contact with an amount of an mTOR inhibitor that increases the number of PD1 negative immune effector cells, e.g., T cells or NK cells, or increases the ratio of PD1 negative immune effector cells, e.g., T cells or NK cells/PD1 positive immune effector cells, e.g., T cells or NK cells.

[0070] In an embodiment, administration of a low, immune enhancing, dose of an mTOR inhibitor, e.g., an allosteric inhibitor, e.g., RAD001, or a catalytic inhibitor, is initiated prior to administration of an CAR expressing cell described herein, e.g., immune effector cells (e.g., T cells or NK cells). In an embodiment, the CAR cells are administered after a sufficient time, or sufficient dosing, of an mTOR inhibitor, such that the level of PD1 negative immune effector cells, e.g., T cells or NK cells, or the ratio of PD1 negative immune effector cells, e.g., T cells or NK cells/PD1 positive immune effector cells, e.g., T cells or NK cells, has been, at least transiently, increased.

[0071] In an embodiment, the cell, e.g., immune effector cell (e.g., T cell or NK cell), to be engineered to express a CAR, is harvested after a sufficient time, or after sufficient dosing of the low, immune enhancing, dose of an mTOR inhibitor, such that the level of PD1 negative immune effector cells, e.g., T cells or NK cells, or the ratio of PD1 negative immune effector cells, e.g., T cells or NK cells/PD1 positive immune effector cells, e.g., T cells or NK cells, in the subject or harvested from the subject has been, at least transiently, increased.

[0072] In an embodiment, the invention provides an mTOR inhibitor for use in the treatment of a subject, wherein said mTOR inhibitor enhances an immune response of said subject, and wherein said subject has received, is receiving or is about to receive an immune effector cell that expresses a BCMA CAR as described herein. In one embodiment, the cells expressing a CAR molecule, e.g., a CAR molecule described herein, are administered in combination with an agent that ameliorates one or more side effect associated with administration of a cell expressing a CAR molecule, e.g., an agent described herein.

[0073] In one embodiment, the cells expressing a CAR molecule, e.g., a CAR molecule described herein, are administered in combination with an agent that treats the disease associated with BCMA, e.g., an agent described herein.

[0074] In certain embodiments, the disease associated with BCMA is a proliferative disease such as a cancer or malignancy or a precancerous condition such as a myelodysplasia, a myelodysplastic syndrome or a preleukemia, or is a non-cancer related indication associated with expression of BCMA.

[0075] In certain embodiments, the disease associated with BCMA is a hematologic cancer selected from the group consisting of one or more acute leukemias including but not limited to acute myeloid leukemia (AML); myelodysplastic syndrome; myeloproliferative neoplasms; chronic myeloid leukemia (CML); Blastic plasmacytoid dendritic cell neoplasm; multiple myeloma; and to disease associated with BMCA expression including, but not limited to atypical and/or non-classical cancers, malignancies, precancerous conditions or proliferative diseases expressing BCMA; and combinations thereof. In one embodiment, the disease associated with BCMA is multiple myeloma. In embodiments, a disease associated with expression of BCMA includes a plasma cell proliferative disorder, e.g., asymptomatic myeloma (smoldering multiple myeloma or indolent myeloma), monoclonal gammapathy of undetermined significance (MGUS), Waldenstrom's macroglobulinemia, plasmacytomas (e.g., plasma cell dyscrasia, solitary myeloma, solitary plasmacytoma, extramedullary plasmacytoma, and multiple plasmacytoma), systemic amyloid light chain amyloidosis, and POEMS syndrome (also known as Crow-Fukase syndrome, Takatsuki disease, and PEP syndrome). In embodiments, a disease associated with expression of BCMA includes a cancer, e.g., a cancer described herein, e.g., a prostate cancer (e.g., castrate-resistant or therapy-resistant prostate cancer, or metastatic prostate cancer), pancreatic cancer, or lung cancer.

[0076] In embodiments, a BCMA CAR-expressing cell, e.g., a BCMA CAR-expressing cell described herein, is used to treat a subject having multiple myeloma. In embodiments, a BCMA CAR-expressing cell, e.g., BCMA CAR-expressing cell described herein, is used to treat a subject having a plasma cell proliferative disorder, e.g., asymptomatic myeloma (smoldering multiple myeloma or indolent myeloma), monoclonal gammapathy of undetermined significance (MGUS), Waldenstrom's macroglobulinemia, plasmacytomas (e.g., plasma cell dyscrasia, solitary myeloma, solitary plasmacytoma, extramedullary plasmacytoma, and multiple plasmacytoma), systemic amyloid light chain amyloidosis, and POEMS syndrome (also known as Crow-Fukase syndrome, Takatsuki disease, and PEP syndrome). In embodiments, a BCMA CAR-expressing cell, e.g., BCMA CAR-expressing cell described herein, is used to treat a subject having a cancer, e.g., a cancer described herein, e.g., a prostate cancer (e.g., castrate-resistant or therapy-resistant prostate cancer, or metastatic prostate cancer), pancreatic cancer, or lung cancer.

[0077] In embodiments, a BCMA CAR-expressing cell, e.g., a BCMA CAR-expressing cell described herein, is administered to the subject according to a dosing regimen comprising a total dose of cells administered to the subject by dose fractionation, e.g., one, two, three or more separate administration of a partial dose. In embodiments, a first percentage of the total dose is administered on a first day of treatment, a second percentage of the total dose is administered on a subsequent (e.g., second, third, fourth, fifth, sixth, or seventh or later) day of treatment, and optionally, a third percentage (e.g., the remaining percentage) of the total dose is administered on a yet subsequent (e.g., third, fourth, fifth, sixth, seventh, eighth, ninth, tenth, or later) day of treatment. For example, 10% of the total dose of cells is delivered on the first day, 30% of the total dose of cells is delivered on the second day, and the remaining 60% of the total dose of cells is delivered on the third day of treatment. For example, a total cell dose includes 1 to 5×10⁷ or 1 to 5×10⁸ BCMA-CART cells.

[0078] In embodiments, a lympho-depleting therapy (e.g., Cytoxan, e.g., at 1.5 g/m²) is administered to the subject before CAR-expressing cell administration. In embodiments, no lympho-depleting therapy (e.g., cytoxan) is administered to the subject before CAR-expressing cell administration.

[0079] In embodiments, no lympho-depleting chemotherapy is administered, and a total BCMA-CART cell dose of 1 to 5×10⁷ is administered (e.g., by infusion) with 10% of the cell dose on day 1 of treatment, 30% on day 2 of treatment, and 60% on day 3 of treatment. In another embodiment, no lympho-depleting chemotherapy is administered, and a total BCMA-CART cell dose of 1 to 5×10⁸ is administered (e.g., by infusion) with 10% of the cell dose on day 1 of treatment, 30% on day 2 of treatment, and 60% on day 3 of treatment. In embodiments, a lympho-depleting chemotherapy (cytoxan at 1.5 g/m²) is administered three days before BCMA-CART cell administration, and then a total BCMA-CART cell dose of 1 to 5×10⁷ is administered (e.g., by infusion) with 10% of the cell dose on day 1 of treatment, 30% on day 2 of treatment, and 60% on day 3 of treatment. In embodiments, a lympho-depleting chemotherapy (cytoxan at 1.5 g/m²) is administered three days before BCMA-CART cell administration, and then a total BCMA-CART cell dose of 1 to 5×10⁸ is administered (e.g., by infusion) with 10% of the cell dose on day 1 of treatment, 30% on day 2 of treatment, and 60% on day 3 of treatment.

[0080] In another aspect, the invention pertains to a method of conditioning a subject prior to cell transplantation comprising administering to the subject an effective amount of the cell of comprising a CAR molecule described herein. In one embodiment, the cell transplantation is a stem cell transplantation. The stem cell transplantation is a hematopoietic stem cell stransplantation or a bone marrow transplantation. In one embodiment, the cell transplantation is allogeneic or autologous.

[0081] In one embodiment, the conditioning a subject prior to cell transplantation comprises reducing the number of BCMA-expressing cells in a subject. The BCMA-expressing cells in the subject are BCMA-expressing normal cells or BCMA-expressing cancer cells, and in some cases, the condition in the subject will reduce both BCMA-expressing normal and cancer cells prior to a cell transplantation.

[0082] In another aspect, the invention pertains to the isolated nucleic acid molecule encoding a CAR of the invention, the isolated polypeptide molecule of a CAR of the invention, the vector comprising a CAR of the invention, and the cell comprising a CAR of the invention for use as a medicament, e.g., as described herein.

[0083] In another aspect, the invention pertains to a the isolated nucleic acid molecule encoding a CAR of the invention, the isolated polypeptide molecule of a CAR of the invention, the vector comprising a CAR of the invention, and the cell comprising a CAR of the invention for use in the treatment of a disease expressing BCMA, e.g., a disease expressing BCMA as described herein.

[0084] Additional features and embodiments of the aforesaid compositions and methods include one or more of the following:

[0085] In certain embodiments, the BCMA CAR molecule (e.g., a BCMA CAR nucleic acid or a BCMA CAR polypeptide as described herein), or the BCMA binding domain as described herein, includes one, two or three CDRs from the heavy chain variable region (e.g., HC CDR1, HC CDR2 and/or HC CDR3), provided in Table 20; and/or one, two or three CDRs from the light chain variable region (e.g., LC CDR1, LC CDR2 and/or LC CDR3) of BCMA-1, BCMA-2, BCMA-3, BCMA-4, BCMA-5, BCMA-6, BCMA-7, BCMA-8, BCMA-9, BCMA-10, BCMA-11, BCMA-12, BCMA-13, BCMA-14, BCMA-15, 149362, 149363, 149364, 149365, 149366, 149367, 149368, 149369, BCMA_EBB-C1978-A4, BCMA_EBB-C1978-G1, BCMA_EBB-C1979-C1, BCMA_EBB-C1978-C7, BCMA_EBB-C1978-D10, BCMA_EBB-C1979-C12, BCMA_EBB-C1980-G4, BCMA_EBB-C1980-D2, BCMA_EBB-C1978-A10, BCMA_EBB-C1978-D4, BCMA_EBB-C1980-A2, BCMA_EBB-C1981-C3, BCMA_EBB-C1978-G4, A7D12.2, C11D5.3, C12A3.2, C13F12.1, provided in Table 21; or a sequence substantially identical (e.g., 95-99% identical, or up to 5, 4, 3, 2, or 1 amino acid changes, e.g., substitutions (e.g., conservative substitutions)) to any of the aforesaid sequences.

[0086] In certain embodiments, the BCMA CAR molecule (e.g., a BCMA CAR nucleic acid or a BCMA CAR polypeptide as described herein), or the anti-BCMA antigen binding domain as described herein, includes one, two or three CDRs from the heavy chain variable region (e.g., HC CDR1, HC CDR2 and/or HC CDR3), provided in Table 22; and/or one, two or three CDRs from the light chain variable region (e.g., LC CDR1, LC CDR2 and/or LC CDR3) of BCMA-1, BCMA-2, BCMA-3, BCMA-4, BCMA-5, BCMA-6, BCMA-7, BCMA-8, BCMA-9, BCMA-10, BCMA-11, BCMA-12, BCMA-13, BCMA-14, BCMA-15, 149362, 149363, 149364, 149365, 149366, 149367, 149368, 149369, BCMA_EBB-C1978-A4, BCMA_EBB-C1978-G1, BCMA_EBB-C1979-C1, BCMA_EBB-C1978-C7, BCMA_EBB-C1978-D10, BCMA_EBB-C1979-C12, BCMA_EBB-C1980-G4, BCMA_EBB-C1980-D2, BCMA_EBB-C1978-A10, BCMA_EBB-C1978-D4, BCMA_EBB-C1980-A2, BCMA_EBB-C1981-C3, BCMA_EBB-C1978-G4, A7D12.2, C11D5.3, C12A3.2, C13F12.1, provided in Table 23; or a sequence substantially identical (e.g., 95-99% identical, or up to 5, 4, 3, 2, or 1 amino acid changes, e.g., substitutions (e.g., conservative substitutions)) to any of the aforesaid sequences. In certain embodiments, the BCMA CAR molecule, or the anti-BCMA antigen binding domain, includes one, two or three CDRs from the heavy chain variable region (e.g., HCDR1, HCDR2 and/or HCDR3), provided in Table 24; and/or one, two or three CDRs from the light chain variable region (e.g., LC CDR1, LC CDR2 and/or LC CDR3) of BCMA-1, BCMA-2, BCMA-3, BCMA-4, BCMA-5, BCMA-6, BCMA-7, BCMA-8, BCMA-9, BCMA-10, BCMA-11, BCMA-12, BCMA-13, BCMA-14, BCMA-15, 149362, 149363, 149364, 149365, 149366, 149367, 149368, 149369, BCMA_EBB-C1978-A4, BCMA_EBB-C1978-G1, BCMA_EBB-C1979-C1, BCMA_EBB-C1978-C7, BCMA_EBB-C1978-D10, BCMA_EBB-C1979-C12, BCMA_EBB-C1980-G4, BCMA_EBB-C1980-D2, BCMA_EBB-C1978-A10, BCMA_EBB-C1978-D4, BCMA_EBB-C1980-A2, BCMA_EBB-C1981-C3, BCMA_EBB-C1978-G4, A7D12.2, C11D5.3, C12A3.2, C13F12.1, provided in Table 25; or a sequence substantially identical (e.g., 95-99% identical, or up to 5, 4, 3, 2, or 1 amino acid changes, e.g., substitutions (e.g., conservative substitutions)) to any of the aforesaid sequences.

[0087] In certain embodiments, the BCMA CAR molecule, or the anti-BCMA antigen binding domain, includes

[0088] (i) a LC CDR1, LC CDR2 and LC CDR3 of any BCMA light chain binding domain amino acid sequences listed in Table 1 or 16, in SEQ ID NO: 271 or 273, or in the LC CDRs in Table 21, 23 or 25; and/or.

[0089] (ii) a HC CDR1, HC CDR2 and HC CDR3 of any BCMA heavy chain binding domain amino acid sequences listed in Table 1 or 16, in SEQ ID NO: 271 or 273, or in the HC CDRs in Table 20, 22, or 24.

[0090] In certain embodiments, the BCMA molecule (e.g., a BCMA CAR nucleic acid or a BCMA CAR polypeptide as described herein), or the anti-BCMA antigen binding domain as described herein, includes:

(1) three light chain (LC) CDRs chosen from one of the following:

[0091] (i) a LC CDR1 of SEQ ID NO: 504, LC CDR2 of SEQ ID NO: 544 and LC CDR3 of SEQ ID NO: 584 of BCMA-4 CAR (139103);

[0092] (ii) a LC CDR1 of SEQ ID NO: 514, LC CDR2 of SEQ ID NO: 554 and LC CDR3 of SEQ ID NO: 594 of BCMA-10 CAR (139109);

[0093] (iii) a LC CDR1 of SEQ ID NO: 516, LC CDR2 of SEQ ID NO: 556 and LC CDR3 of SEQ ID NO: 596 of BCMA-13 CAR (139112); or

[0094] (iv) a LC CDR1 of SEQ ID NO: 518, LC CDR2 of SEQ ID NO: 558 and LC CDR3 of SEQ ID NO: 598 of BCMA-15 CAR (139114); and/or

(2) three heavy chain (HC) CDRs chosen from one of the following:

[0095] (i) a HC CDR1 of SEQ ID NO: 384, HC CDR2 of SEQ ID NO: 424 and HC CDR3 of SEQ ID NO: 464 of BCMA-4 CAR (139103);

[0096] (ii) a HC CDR1 of SEQ ID NO: 394, HC CDR2 of SEQ ID NO: 434 and HC CDR3 of SEQ ID NO: 474 of BCMA-10 CAR (139109);

[0097] (iii) a HC CDR1 of SEQ ID NO: 396, HC CDR2 of SEQ ID NO: 436 and HC CDR3 of SEQ ID NO: 476 of BCMA-13 CAR (139112); or

[0098] (iv) a HC CDR1 of SEQ ID NO: 398, HC CDR2 of SEQ ID NO: 438 and HC CDR3 of SEQ ID NO: 478 of BCMA-15 (139114).

[0099] In certain embodiments, the BCMA CAR molecule (e.g., a BCMA CAR nucleic acid or a BCMA CAR polypeptide as described herein), or the anti-BCMA antigen binding domain as described herein, includes:

(1) three light chain (LC) CDRs chosen from one of the following:

[0100] (i) a LC CDR1 of SEQ ID NO: 744, LC CDR2 of SEQ ID NO: 784 and LC CDR3 of SEQ ID NO: 824 of BCMA-4 CAR (139103);

[0101] (ii) a LC CDR1 of SEQ ID NO: 754, LC CDR2 of SEQ ID NO: 794 and LC CDR3 of SEQ ID NO: 834 of BCMA-10 CAR (139109);

[0102] (iii) a LC CDR1 of SEQ ID NO: 756, LC CDR2 of SEQ ID NO: 796 and LC CDR3 of SEQ ID NO: 836 of BCMA-13 CAR (139112); or

[0103] (iv) a LC CDR1 of SEQ ID NO: 758, LC CDR2 of SEQ ID NO: 798 and LC CDR3 of SEQ ID NO: 838 of BCMA-15 CAR (139114); and/or

(2) three heavy chain (HC) CDRs chosen from one of the following:

[0104] (i) a HC CDR1 of SEQ ID NO: 624, HC CDR2 of SEQ ID NO: 664 and HC CDR3 of SEQ ID NO: 704 of BCMA-4 CAR (139103);

[0105] (ii) a HC CDR1 of SEQ ID NO: 634, HC CDR2 of SEQ ID NO: 674 and HC CDR3 of SEQ ID NO: 714 of BCMA-10 CAR (139109);

[0106] (iii) a HC CDR1 of SEQ ID NO: 636, HC CDR2 of SEQ ID NO: 676 and HC CDR3 of SEQ ID NO: 716 of BCMA-13 CAR (139112); or

[0107] (iv) a HC CDR1 of SEQ ID NO: 638, HC CDR2 of SEQ ID NO: 678 and HC CDR3 of SEQ ID NO: 718 of BCMA-15 CAR (139114).

[0108] In certain embodiments, the BCMA CAR molecule (e.g., a BCMA CAR nucleic acid or a BCMA CAR polypeptide as described herein), or the anti-BCMA antigen binding domain as described herein, includes:

(1) three light chain (LC) CDRs chosen from one of the following:

[0109] (i) a LC CDR1 of SEQ ID NO: 984 LC CDR2 of SEQ ID NO: 1024 and LC CDR3 of SEQ ID NO: 1064 of BCMA-4 CAR (139103);

[0110] (ii) a LC CDR1 of SEQ ID NO: 994, LC CDR2 of SEQ ID NO: 1034 and LC CDR3 of SEQ ID NO: 1074 of BCMA-10 CAR (139109);

[0111] (iii) a LC CDR1 of SEQ ID NO: 996, LC CDR2 of SEQ ID NO: 1036 and LC CDR3 of SEQ ID NO: 1076 of BCMA-13 CAR (139112); or

[0112] (iv) a LC CDR1 of SEQ ID NO: 998, LC CDR2 of SEQ ID NO: 1038 and LC CDR3 of SEQ ID NO: 1078 of BCMA-15 CAR (139114); and/or

(2) three heavy chain (HC) CDRs chosen from one of the following:

[0113] (i) a HC CDR1 of SEQ ID NO: 864, HC CDR2 of SEQ ID NO: 904 and HC CDR3 of SEQ ID NO: 944 of BCMA-4 CAR (139103);

[0114] (ii) a HC CDR1 of SEQ ID NO: 874, HC CDR2 of SEQ ID NO: 914 and HC CDR3 of SEQ ID NO: 954 of BCMA-10 CAR (139109);

[0115] (iii) a HC CDR1 of SEQ ID NO: 876, HC CDR2 of SEQ ID NO: 916 and HC CDR3 of SEQ ID NO: 956 of BCMA-13 CAR (139112);

[0116] (iv) a HC CDR1 of SEQ ID NO: 878, HC CDR2 of SEQ ID NO: 918 and HC CDR3 of SEQ ID NO: 958 of BCMA-15 CAR (139114).

[0117] In certain embodiments, the BCMA CAR molecule (e.g., a BCMA CAR nucleic acid or a BCMA CAR polypeptide as described herein), or the anti-BCMA antigen binding domain as described herein, includes the humanized scFv amino acid sequence of SEQ ID NO: 271 or 273 or a nucleotide sequence encoding scFv (SEQ ID NO: 272 or 274), or an antigen binding domain thereof (e.g., a VH, VL or one or more CDRs thereof).

[0118] Unless otherwise defined, all technical and scientific terms used herein have the same meaning as commonly understood by one of ordinary skill in the art to which this invention belongs. Although methods and materials similar or equivalent to those described herein can be used in the practice or testing of the present invention, suitable methods and materials are described below. All publications, patent applications, patents, and other references mentioned herein are incorporated by reference in their entirety. In addition, the materials, methods, and examples are illustrative only and not intended to be limiting. Headings, sub-headings or numbered or lettered elements, e.g., (a), (b), (i) etc, are presented merely for ease of reading. The use of headings or numbered or lettered elements in this document does not require the steps or elements be performed in alphabetical order or that the steps or elements are necessarily discrete from one another. Other features, objects, and advantages of the invention will be apparent from the description and drawings, and from the claims.

### BRIEF DESCRIPTION OF THE DRAWINGS

[0119] FIG. 1, comprising FIGS. 1A and 1B, is two graphical representations of BCMA expression in myeloma samples as determined by quantitative PCR. BCMA expression was determined in different myeloma cell lines (FIG. 1A). BCMA expression was compared between normal plasma cells and myeloma patient samples (FIG. 1B)

[0120] FIG. 2, comprising FIGS. 2A, 2B, 2C, 2D, and 2E, is a series of graphical representations of BCMA expression in multiple myeloma cell lines and primary samples by flow cytometry. BCMA was detected on the surface of cell lines U266 (FIG. 2A), H929 (FIG. 2B), and 8226 (FIG. 2C). BCMA was also homogenously expressed on the majority of clonal plasma cells in 9 out of 10 multiple myeloma patients analyzed (FIGS. 2D and 2E).

[0121] FIG. 3, comprising FIGS. 3A and 3B, is a series of graphical representations demonstrating the lack of BCMA expression in normal peripheral blood cells and after CD3/CD28 expansion (FIG. 3A) and on normal bone marrow cells (FIG. 3B).

[0122] FIG. 4, comprising FIGS. 4A, 4B, 4C, 4D, 4E, and 4F, is a series of pictures and a graph showing BCMA expression in normal tissues. Tissues that stained positive for BCMA expression in immunohistochemical analysis were lymph node (FIG. 4A) and tonsil (FIG. 4B). Representative tissues that did not stain for BCMA expression (BCMA negative) included lung (FIG. 4C), pancreas (FIG. 4D), and thyroid (FIG. 4E). RNA in situ hybridization analysis in different tissues was also performed (FIG. 4F).

[0123] FIG. 5 is a schematic representation of the four CAR constructs containing humanized murine anti-BCMA scFvs, designated pBCMA1, pBCMA2, pBCMA3, and pBCMA4.

[0124] FIG. 6 is a series of flow cytometry plots showing the transduction efficiency and expression of the BMCA-CAR constructs on T cells. SS1-BBz represents anti-mesothelin CAR, which serves as a negative control.

[0125] FIG. 7, comprising FIG. 7A and FIG. 7B, is two graphs demonstrating the antigen-specific cytokine production of BCMA-CARTs, as measured by ELISA assays. IL2 (FIG. 7A) and interferon-gamma (IFNg) (FIG. 7B) production was assessed.

[0126] FIG. 8, comprising FIG. 8A, FIG. 8B, FIG. 8C, and FIG. 8D, is a series of graphs demonstrating the cyotoxic activity BCMA-CARTs on the indicated myeloma cell lines: K562-expressing BCMA (FIG. 8A); 8226 (FIG. 8B); NCI H929 (FIG. 8C); and OPM2 (FIG. 8D).

[0127] FIG. 9, comprising FIG. 9A and FIG. 9B, is a graph and a series of pictures showing the anti-tumor activity of the BCMA-CARTs in a preclinical multiple myeloma animal model. FIG. 9A shows the quantification of mean bioluminescence representing disease burden in the whole animal (represented by photons/second). FIG. 9B shows pictures of the bioluminescence detected in the treated mice at 5, 15, and 20 days after treatment.

[0128] FIG. 10, comprising FIGS. 10A and 10B, is a series of schematic representations of tool BCMA CAR constructs containing humanized murine anti-BCMA scFvs.

[0129] FIG. 11 is a series of graphs demonstrating target-specific activation of tool BCMA CAR constructs transduced in a reporter cell line by luciferase reporter assay.

[0130] FIG. 12 is a flow cytometry plot showing the distribution of CD4+ and CD8+ populations of T cells after CD3/CD28 expansion prior to transduction with tool BCMA CAR constructs.

[0131] FIG. 13 is a series of plots showing CART transduction efficiency by detection of the BCMA-Fc antigen 10 days after transduction by flow cytometry analysis and corresponding histograms.

[0132] FIG. 14 is a series of histogram plots showing proliferation of the tool BCMA CART cells by CFSE staining after stimulation with the indicated target cells (e.g., K562, K562 expressing BCMA, KMS11-luc, MM1-S-luc, NCI-H929, KMs26, RPMI 8226, and CD3/CD28 beads).

[0133] FIG. 15, comprising FIGS. 15A and 15B, are two graphs showing the proliferation of the tool BCMA CART cells by cell count (as measured by flow cytometry) for CART-expressing cells (FIG. 15A) and the total number of cells (FIG. 15B), after stimulation with the indicated target cells.

[0134] FIG. 16 is a graph showing the tool BCMA CART killing in response to BCMA-expressing target cells KMS11-luciferase cells (left) and MM1-S-luciferase cells (right) by luciferase assay.

[0135] FIG. 17 is a series of graphs showing tool BCMA CART killing in response to BCMA-expressing target cells by CFSE cell killing assay.

[0136] FIG. 18 is a series of graphs demonstrating target-specific activation of BCMA CARs containing human anti-BCMA scFvs transduced in a reporter cell line by luciferase reporter assay.

[0137] FIG. 19 is a flow cytometry plot showing the distribution of CD4+ and CD8+ T cell populations after CD3/CD28 expansion, and before CAR transduction.

[0138] FIG. 20 is a series of flow cytometry plots and corresponding histogram plots showing the transduction efficiency by assessing CAR expression on the transduced T cells.

[0139] FIG. 21 is a series of histogram plots showing the cell proliferation of BCMA CART cells in response to stimulation with the indicated target cells (K562, K562 expressing BCMA, RPMI 8226, KM11-luc, and NCI-H929), as measured by CFSE staining.

[0140] FIG. 22, comprising FIG. 22A, FIG. 22B, and FIG. 22C, is a series of graphs that demonstrate BCMA CART cell proliferation in response to stimulation with the indicated target cells (K562, K562 expressing BCMA, RPMI 8226, KMS11-luc, and NCI-H929), as measured by flow cytometry analysis. Proliferation of the CART cells was independently analyzed for each T cell populations expressing CD3 (FIG. 22A), CD4 (FIG. 22B), and CD8 (FIG. 22C).

[0141] FIG. 23, comprising FIGS. 23A, 23B, and 23C, is a series of graphs showing BCMA CART killing in response to BCMA-expressing KMS11-luciferase target cells, by luciferase assay. Killing capacity (percent of target cells killed) of each BCMA CAR construct is compared to BCMA-3NP and BCMA-4NP in each graph in FIG. 23A. In FIG. 23B, select BCMA CAR constructs were compared to each other. In FIG. 23C, the effector:target ratio was normalized to the CAR-expressing cells. X-axis represents the percent of target cells killed; Y-axis represents effector:target (E:T) ratio.

[0142] FIG. 24 is a graph showing that treatment with BCMA CARTs results in control of disease progression in the KMS-11-luc human multiple myeloma xenograft in NSG mice. Mean bioluminescence (+/−SEM) of the tumor cells shows the disease burden in the whole animal, as represented in the graph as photons/second (p/s) of the ROI (region of interest, e.g., the whole mouse). Significance calculated by ANOVA versus the vehicle; * denotes P<0.01.

[0143] FIG. 25, comprising FIGS. 25A and 25B, is two graphs demonstrating anti-tumor activity of BCMA CAR T cells in the KMS-11 human multiple myeloma model in two independent experiments. Mean bioluminescence (+/−SEM) of the tumor cells shows the disease burden in the whole animal, represented in the graph as photons/second (p/s) (or total flux or BLI) of the whole mouse. Significance calculated by ANOVA versus the vehicle on day 28; * denotes P<0.01 in FIG. 25A. In FIG. 25B, BCMA-4NP* denotes the BCMA-4NP results from the first experiment (results shown in FIG. 25A).

[0144] FIG. 26, comprising FIGS. 26A, 26B, 26C, and 26D, is graphs showing the proliferation of BCMA-CART cells by quantification of BCMA-CART cell number in the peripheral blood of KMS-11-luc tumor-bearing mice. Peripheral blood T cells were analyzed on days 1, 3, 7, 10, 14 and weekly thereafter following CAR T cell treatment. From the first tumor experiment (results shown in FIG. 25A), the CD4+CART population was assessed in FIG. 26A and the CD8+CART population was assessed in FIG. 26B. From the second tumor experiment (results shown in FIG. 25B), the CD4+CART population was assessed in FIG. 26C and the CD8+CART population was assessed in FIG. 26D.

[0145] FIG. 27, comprising FIGS. 27A, 27B, 27C, and 27D, is graphs showing the expansion of BCMA CAR-expressing T cells in the bone marrow and spleen at the end of the first tumor experiment (results shown in FIG. 25A). The average number of CD4+BCMA CAR-expressing T cells in the bone marrow (FIG. 27A) and the spleen (FIG. 27B) was calculated. The average number of CD4=8+BCMA CAR-expressing T cells in the bone marrow (FIG. 27C) and the spleen (FIG. 27D) was calculated. J6MO sample represents CAR T cells expressing the BCMA-4NP CAR construct.

[0146] FIG. 28, comprising FIGS. 28A and 28B, is graphs showing the lentiviral titer for select BCMA CAR constructs in two independent lentiviral experiments. In the first test run, two different DNA preps of the BCMA CAR constructs were tested (A and B) (FIG. 28A). In the second test run, three different DNA preps of the BCMA CAR constructs were tested (A, B, and C) (FIG. 28B).

[0147] FIG. 29 is a graph showing the competition assay between BCMA-4NP and select BCMA CAR constructs, BCMA-4 (B4), BCMA-10 (B10), BCMA-13 (B13) and BCMA-15 (B15).

[0148] FIG. 30, comprising FIGS. 30A, 30B, 30C, 30D, and 30E, is graphs showing the results of affinity assays for select BCMA constructs: BMCA-10 (FIG. 30A); BCMA-13 (FIG. 30B), BCMA-15 (FIG. 30C), BCMA-4 (FIG. 30D), and BCMA-4NP (FIG. 30E).

[0149] FIG. 31 is a graph showing the selective binding of select BCMA CAR-expressing T cells for recombinant BCMA. Recombinant forms of BCMA and closely related family members BAFFR and TACI comprising the proteins fused to Fc domains were incubated with T cells expressing BCMA-4, BCMA-10, BCMA-13, and BCMA-15. The percentage of cells that bound to the recombinant proteins (% positive cells) was detected.

[0150] FIG. 32, comprising FIGS. 32A, 32B, 32C, 32D, 32E, and 32F, is a series of images depicting the immunohistochemical staining of BCMA in brain tissue. BCMA-staining in climbing fibers of the cerebellum of cynomolgus macaque (FIG. 32A). BCMA-staining in the neuronal cell bodies in the inferior olivary nucleus of cynomolgus macaque (FIG. 32B). BCMA-staining (FIG. 32C) and Ig staining (control) (FIG. 32E) in cynomolgus macaque medulla oblongata. BCMA-staining (FIG. 32D) and Ig staining (control) (FIG. 32F) in human medulla oblongata.

[0151] FIG. 33, comprising FIGS. 33A, 33B, 33C, 33D, and 33E, is a series of images and a graph that depicts RNA analysis of BCMA expression in brain tissue. BCMA, DAPB, and PPIB RNA in situ hybridization of non-human primate cerebellum (FIG. 33A). BCMA, DAPB, and PPIB RNA in situ hybridization of non-human primate medulla oblongata (FIG. 33B). Quantitative PCR analysis of BCMA in cerebellum, medulla oblongata, stomach, and kidney in human (FIG. 33C). Quantitative PCR analysis of BCMA in white matter, grey matter, medulla oblongata, stomach, and kidney in cynomolgus macaque (FIG. 33D). RNAseq analysis of normal tissue in human (FIG. 33E); the box indicates BCMA-expression in cerebellum.

[0152] FIG. 34 is a schematic diagram showing the timeline of the study to assess the safety and feasibility of BCMA CART cell therapy in relapsed and/or refractory myeloma.

[0153] FIGS. 35A and 35B are graphs showing the concentration of cytokines secreted by BCMA-10 CARTs when co-cultured with target cells. FIG. 35A is a graph showing the concentration of interleukin-2 (IL-2) and interferon-gamma (IFNγ) secreted by BCMA-10 CARTs. FIG. 35B is a graph showing the concentration of tumor necrosis factor-alpha (TNF-α) secreted by BCMA-10 CARTs.

[0154] FIGS. 36A and 36B are graphs/plots showing the growth curve and efficiency of huBCMA-BBz lentiviral transduction of T cells. FIG. 36A is a graph showing the number of T cell transduced with huBCMA-BBz vector on several days after expansion. FIG. 36B is a panel of flow cytometry plots showing the expression on day 6 of ex vivo expansion of BCMA on CART-BCMA cells (T cells transduced with huBCMA-BBz vector) compared to non-transduced NTD cells.

[0155] FIG. 37 is a panel of flow cytometry histograms showing the BCMA surface expression on various cell lines, including K562-BCMA cells and multiple myeloma cell lines NCI H929, U266, RPMI 8226, OPM2 and MM1S. For all plots, the orange solid peak represents isotype control and the blue solid peak staining with BCMA antibody.

[0156] FIGS. 38A and 38B are graphs showing the concentration of cytokines produced by CART-BCMA cells in response to myeloma cell lines. FIG. 38A shows the concentration of IL-2 produced, and FIG. 38B shows the concentration of IFN-γ produced. Values represent cytokine concentration in pg/mL.

[0157] FIGS. 39A, 39B, and 39C are graphs showing the antigen-specific killing of BCMA multiple myeloma cell lines by CART-BCMA cells. FIG. 39A shows the antigen-specific killing of K562-BCMA cells, FIG. 39B shows the antigen specific killing of RPMI 8226 cells, and FIG. 39C shows the antigen specific killing of MM1S cells.

[0158] FIGS. 40A, 40B, and 40C are graphs showing that CART-BCMA cells displayed effective anti-myeloma activity in vivo. FIG. 40A is a graph showing total radiance in non-transduced mice, and FIG. 40B is a graph showing total radiance in CART-BCMA mice.

[0159] FIG. 40C is a graph showing percent survival of NTD or CART-BCMA mice after T cell injection. Dorsal photon emission from RPMI 8226 CBG+ tumors are shown with individual animals depicted in grey and median total radiance shown in red. n=10 for each group. Time is shown in weeks following T cell injection.

[0160] FIG. 41A-41D show the various configurations on a single vector, e.g., where the U6 regulated shRNA is upstream or downstream of the EF1 alpha regulated CAR encoding elements. In the exemplary constructs depicted in FIGS. 41A and 41B, the transcription occurs through the U6 and EF1 alpha promoters in the same direction. In the exemplary constructs depicted in FIGS. 41C and 41D, the transcription occurs through the U6 and EF1 alpha promoters in different directions. In FIG. 41E, the shRNA (and corresponding U6 promoter) is on a first vector, and the CAR (and corresponding EF1 alpha promoter) is on a second vector.

[0161] FIG. 42 depicts the structures of two exemplary RCAR configurations. The antigen binding members comprise an antigen binding domain, a transmembrane domain, and a switch domain. The intracellular binding members comprise a switch domain, a co-stimulatory signaling domain and a primary signaling domain. The two configurations demonstrate that the first and second switch domains described herein can be in different orientations with respect to the antigen binding member and the intracellular binding member. Other RCAR configurations are further described herein.

[0162] FIG. 43 shows that the proliferation of CAR-expressing, transduced T cells is enhanced by low doses of RAD001 in a cell culture system. CARTs were co-cultured with Nalm-6 cells in the presence of different concentrations of RAD001. The number of CAR-positive CD3-positive T cells (black) and total T cells (gray) was assessed after 4 days of co-culture.

[0163] FIG. 44 depicts tumor growth measurements of NALM6-luc cells with daily RAD001 dosing at 0.3, 1, 3, and 10 mg/kg (mpk) or vehicle dosing. Circles denote the vehicle; squares denote the 10 mg/kg dose of RAD001; triangles denote the 3 mg/kg dose of RAD001, inverted triangles denote the 1 mg/kg dose of RAD001; and diamonds denote the 0.3 mg/kg dose of RAD001.

[0164] FIGS. 45A and 45B show pharmacokinetic curves showing the amount of RAD001 in the blood of NSG mice with NALM6 tumors. FIG. 45A shows day 0 PK following the first dose of RAD001. FIG. 45B shows Day 14 PK following the final RAD001 dose. Diamonds denote the 10 mg/kg dose of RAD001; squares denote the 1 mg/kg dose of RAD001; triangles denote the 3 mg/kg dose of RAD001; and x's denote the 10 mg/kg dose of RAD001.

[0165] FIGS. 46A and 46B show in vivo proliferation of humanized CD19 CART cells with and without RAD001 dosing. Low doses of RAD001 (0.003 mg/kg) daily lead to an enhancement in CAR T cell proliferation, above the normal level of huCAR19 proliferation. FIG. 46A shows CD4⁺ CAR T cells; FIG. 46B shows CD8⁺ CAR T cells. Circles denote PBS; squares denote huCTL019; triangles denote huCTL019 with 3 mg/kg RAD001; inverted triangles denote huCTL019 with 0.3 mg/kg RAD001; diamonds denote huCTL019 with 0.03 mg/kg RAD001; and circles denote huCTL019 with 0.003 mg/kg RAD001.

[0166] FIG. 47 depicts CD19 expression in a patient's tumor cells. CD138⁺ CD45^{dim} tumor cells were stained for CD19 (x-axis) and CD38 (y-axis). Approximately 1-2% of the tumor cells expressed the CD19 antigen.

### DETAILED DESCRIPTION

### Definitions

[0167] Unless defined otherwise, all technical and scientific terms used herein have the same meaning as commonly understood by one of ordinary skill in the art to which the invention pertains.

[0168] The term “a” and “an” refers to one or to more than one (i.e., to at least one) of the grammatical object of the article. By way of example, “an element” means one element or more than one element.

[0169] The term “about” when referring to a measurable value such as an amount, a temporal duration, and the like, is meant to encompass variations of ±20% or in some instances ±10%, or in some instances ±5%, or in some instances ±1%, or in some instances ±0.1% from the specified value, as such variations are appropriate to perform the disclosed methods.

[0170] The term “Chimeric Antigen Receptor” or alternatively a “CAR” refers to a recombinant polypeptide construct comprising at least an extracellular antigen binding domain, a transmembrane domain and a cytoplasmic signaling domain (also referred to herein as “an intracellular signaling domain”) comprising a functional signaling domain derived from a stimulatory molecule as defined below. In some embodiments, the domains in the CAR polypeptide construct are in the same polypeptide chain, e.g., comprise a chimeric fusion protein. In some embodiments, the domains in the CAR polypeptide construct are not contiguous with each other, e.g., are in different polypeptide chains, e.g., as provided in an RCAR as described herein.

[0171] In one aspect, the stimulatory molecule of the CAR is the zeta chain associated with the T cell receptor complex. In one aspect, the cytoplasmic signaling domain comprises a primary signaling domain (e.g., a primary signaling domain of CD3-zeta). In one aspect, the cytoplasmic signaling domain further comprises one or more functional signaling domains derived from at least one costimulatory molecule as defined below. In one aspect, the costimulatory molecule is chosen from 4-1BB (i.e., CD137), CD27, ICOS, and/or CD28. In one aspect, the CAR comprises a chimeric fusion protein comprising an extracellular antigen recognition domain, a transmembrane domain and an intracellular signaling domain comprising a functional signaling domain derived from a stimulatory molecule. In one aspect, the CAR comprises a chimeric fusion protein comprising an extracellular antigen recognition domain, a transmembrane domain and an intracellular signaling domain comprising a functional signaling domain derived from a co-stimulatory molecule and a functional signaling domain derived from a stimulatory molecule. In one aspect, the CAR comprises a chimeric fusion protein comprising an extracellular antigen recognition domain, a transmembrane domain and an intracellular signaling domain comprising two functional signaling domains derived from one or more co-stimulatory molecule(s) and a functional signaling domain derived from a stimulatory molecule. In one aspect, the CAR comprises a chimeric fusion protein comprising an extracellular antigen recognition domain, a transmembrane domain and an intracellular signaling domain comprising at least two functional signaling domains derived from one or more co-stimulatory molecule(s) and a functional signaling domain derived from a stimulatory molecule. In one aspect the CAR comprises an optional leader sequence at the amino-terminus (N-ter) of the CAR fusion protein. In one aspect, the CAR further comprises a leader sequence at the N-terminus of the extracellular antigen recognition domain, wherein the leader sequence is optionally cleaved from the antigen recognition domain (e.g., aa scFv) during cellular processing and localization of the CAR to the cellular membrane.

[0172] A CAR that comprises an antigen binding domain (e.g., a scFv, a single domain antibody, or TCR (e.g., a TCR alpha binding domain or TCR beta binding domain)) that targets a specific tumor marker X, wherein X can be a tumor marker as described herein, is also referred to as XCAR. For example, a CAR that comprises an antigen binding domain that targets BCMA is referred to as BCMACAR. The CAR can be expressed in any cell, e.g., an immune effector cell as described herein (e.g., a T cell or an NK cell).

[0173] The term “signaling domain” refers to the functional portion of a protein which acts by transmitting information within the cell to regulate cellular activity via defined signaling pathways by generating second messengers or functioning as effectors by responding to such messengers.

[0174] As used herein, the term “BCMA” refers to B-cell maturation antigen. BCMA (also known as TNFRSF17, BCM or CD269) is a member of the tumor necrosis receptor (TNFR) family and is predominantly expressed on terminally differentiated B cells, e.g., memory B cells, and plasma cells. Its ligand is called B-cell activator of the TNF family (BAFF) and a proliferation inducing ligand (APRIL). BCMA is involved in mediating the survival of plasma cells for maintaining long-term humoral immunity. The gene for BCMA is encoded on chromosome 16 producing a primary mRNA transcript of 994 nucleotides in length (NCBI accession NM_{—}001192.2) that encodes a protein of 184 amino acids (NP_{—}001183.2). A second antisense transcript derived from the BCMA locus has been described, which may play a role in regulating BCMA expression. (Laabi Y. et al., Nucleic Acids Res., 1994, 22:1147-1154). Additional transcript variants have been described with unknown significance (Smirnova A S et al. Mol Immunol., 2008, 45(4):1179-1183. A second isoform, also known as TV4, has been identified (Uniprot identifier Q02223-2). As used herein, “BCMA” includes proteins comprising mutations, e.g., point mutations, fragments, insertions, deletions and splice variants of full length wild-type BCMA.

[0175] The term “antibody,” as used herein, refers to a protein, or polypeptide sequence derived from an immunoglobulin molecule, which specifically binds with an antigen. Antibodies can be polyclonal or monoclonal, multiple or single chain, or intact immunoglobulins, and may be derived from natural sources or from recombinant sources. Antibodies can be tetramers of immunoglobulin molecules.

[0176] The term “antibody fragment” refers to at least one portion of an intact antibody, or recombinant variants thereof, and refers to the antigen binding domain, e.g., an antigenic determining variable region of an intact antibody, that is sufficient to confer recognition and specific binding of the antibody fragment to a target, such as an antigen. Examples of antibody fragments include, but are not limited to, Fab, Fab′, F(ab′)₂, and Fv fragments, scFv antibody fragments, linear antibodies, single domain antibodies such as sdAb (either VL or VH), camelid VHH domains, and multi-specific molecules formed from antibody fragments such as a bivalent fragment comprising two or more, e.g., two, Fab fragments linked by a disulfide brudge at the hinge region, or two or more, e.g., two isolated CDR or other epitope binding fragments of an antibody linked. An antibody fragment can also be incorporated into single domain antibodies, maxibodies, minibodies, nanobodies, intrabodies, diabodies, triabodies, tetrabodies, v-NAR and bis-scFv (see, e.g., Hollinger and Hudson, Nature Biotechnology 23:1126-1136, 2005). Antibody fragments can also be grafted into scaffolds based on polypeptides such as a fibronectin type III (Fn3)(see U.S. Pat. No. 6,703,199, which describes fibronectin polypeptide minibodies).

[0177] The term “scFv” refers to a fusion protein comprising at least one antibody fragment comprising a variable region of a light chain and at least one antibody fragment comprising a variable region of a heavy chain, wherein the light and heavy chain variable regions are contiguously linked via a short flexible polypeptide linker, and capable of being expressed as a single chain polypeptide, and wherein the scFv retains the specificity of the intact antibody from which it is derived. Unless specified, as used herein an scFv may have the VL and VH variable regions in either order, e.g., with respect to the N-terminal and C-terminal ends of the polypeptide, the scFv may comprise VL-linker-VH or may comprise VH-linker-VL.

[0178] The terms “complementarity determining region” or “CDR,” as used herein, refer to the sequences of amino acids within antibody variable regions which confer antigen specificity and binding affinity. For example, in general, there are three CDRs in each heavy chain variable region (e.g., HCDR1, HCDR2, and HCDR3) and three CDRs in each light chain variable region (LCDR1, LCDR2, and LCDR3). The precise amino acid sequence boundaries of a given CDR can be determined using any of a number of well-known schemes, including those described by Kabat et al. (1991), “Sequences of Proteins of Immunological Interest,” 5th Ed. Public Health Service, National Institutes of Health, Bethesda, Md. (“Kabat” numbering scheme), Al-Lazikani et al., (1997) JMB 273,927-948 (“Chothia” numbering scheme), or a combination thereof. Under the Kabat numbering scheme, in some embodiments, the CDR amino acid residues in the heavy chain variable domain (VH) are numbered 31-35 (HCDR1), 50-65 (HCDR2), and 95-102 (HCDR3); and the CDR amino acid residues in the light chain variable domain (VL) are numbered 24-34 (LCDR1), 50-56 (LCDR2), and 89-97 (LCDR3). Under the Chothia numbering scheme, in some embodiments, the CDR amino acids in the VH are numbered 26-32 (HCDR1), 52-56 (HCDR2), and 95-102 (HCDR3); and the CDR amino acid residues in the VL are numbered 26-32 (LCDR1), 50-52 (LCDR2), and 91-96 (LCDR3). In a combined Kabat and Chothia numbering scheme, in some embodiments, the CDRs correspond to the amino acid residues that are part of a Kabat CDR, a Chothia CDR, or both. For instance, in some embodiments, the CDRs correspond to amino acid residues 26-35 (HCDR1), 50-65 (HCDR2), and 95-102 (HCDR3) in a VH, e.g., a mammalian VH, e.g., a human VH; and amino acid residues 24-34 (LCDR1), 50-56 (LCDR2), and 89-97 (LCDR3) in a VL, e.g., a mammalian VL, e.g., a human VL.

[0179] The portion of the CAR composition of the invention comprising an antibody or antibody fragment thereof may exist in a variety of forms, for example, where the antigen binding domain is expressed as part of a polypeptide chain including, for example, a single domain antibody fragment (sdAb), a single chain antibody (scFv), or e.g., a humanized antibody (Harlow et al., 1999, In: Using Antibodies: A Laboratory Manual, Cold Spring Harbor Laboratory Press, NY; Harlow et al., 1989, In: Antibodies: A Laboratory Manual, Cold Spring Harbor, New York; Houston et al., 1988, Proc. Natl. Acad. Sci. USA 85:5879-5883; Bird et al., 1988, Science 242:423-426). In one aspect, the antigen binding domain of a CAR composition of the invention comprises an antibody fragment. In a further aspect, the CAR comprises an antibody fragment that comprises a scFv.

[0180] As used herein, the term “binding domain” or “antibody molecule” (also referred to herein as “anti-target (e.g., BCMA) binding domain”) refers to a protein, e.g., an immunoglobulin chain or fragment thereof, comprising at least one immunoglobulin variable domain sequence. The term “binding domain” or “antibody molecule” encompasses antibodies and antibody fragments. In an embodiment, an antibody molecule is a multispecific antibody molecule, e.g., it comprises a plurality of immunoglobulin variable domain sequences, wherein a first immunoglobulin variable domain sequence of the plurality has binding specificity for a first epitope and a second immunoglobulin variable domain sequence of the plurality has binding specificity for a second epitope. In an embodiment, a multispecific antibody molecule is a bispecific antibody molecule. A bispecific antibody has specificity for no more than two antigens. A bispecific antibody molecule is characterized by a first immunoglobulin variable domain sequence which has binding specificity for a first epitope and a second immunoglobulin variable domain sequence that has binding specificity for a second epitope. The term “antibody heavy chain,” refers to the larger of the two types of polypeptide chains present in antibody molecules in their naturally occurring conformations, and which normally determines the class to which the antibody belongs.

[0181] The term “antibody light chain,” refers to the smaller of the two types of polypeptide chains present in antibody molecules in their naturally occurring conformations. Kappa (κ) and lambda (λ) light chains refer to the two major antibody light chain isotypes.

[0182] The term “recombinant antibody” refers to an antibody which is generated using recombinant DNA technology, such as, for example, an antibody expressed by a bacteriophage or yeast expression system. The term should also be construed to mean an antibody which has been generated by the synthesis of a DNA molecule encoding the antibody and which DNA molecule expresses an antibody protein, or an amino acid sequence specifying the antibody, wherein the DNA or amino acid sequence has been obtained using recombinant DNA or amino acid sequence technology which is available and well known in the art.

[0183] The term “antigen” or “Ag” refers to a molecule that provokes an immune response. This immune response may involve either antibody production, or the activation of specific immunologically-competent cells, or both. The skilled artisan will understand that any macromolecule, including virtually all proteins or peptides, can serve as an antigen. Furthermore, antigens can be derived from recombinant or genomic DNA. A skilled artisan will understand that any DNA, which comprises a nucleotide sequences or a partial nucleotide sequence encoding a protein that elicits an immune response therefore encodes an “antigen” as that term is used herein. Furthermore, one skilled in the art will understand that an antigen need not be encoded solely by a full length nucleotide sequence of a gene. It is readily apparent that the present invention includes, but is not limited to, the use of partial nucleotide sequences of more than one gene and that these nucleotide sequences are arranged in various combinations to encode polypeptides that elicit the desired immune response. Moreover, a skilled artisan will understand that an antigen need not be encoded by a “gene” at all. It is readily apparent that an antigen can be generated synthesized or can be derived from a biological sample, or might be macromolecule besides a polypeptide. Such a biological sample can include, but is not limited to a tissue sample, a tumor sample, a cell or a fluid with other biological components.

[0184] The term “anti-tumor effect” refers to a biological effect which can be manifested by various means, including but not limited to, e.g., a decrease in tumor volume, a decrease in the number of tumor cells, a decrease in the number of metastases, an increase in life expectancy, decrease in tumor cell proliferation, decrease in tumor cell survival, or amelioration of various physiological symptoms associated with the cancerous condition. An “anti-tumor effect” can also be manifested by the ability of the peptides, polynucleotides, cells and antibodies of the invention in prevention of the occurrence of tumor in the first place.

[0185] The term “anti-cancer effect” refers to a biological effect which can be manifested by various means, including but not limited to, e.g., a decrease in tumor volume, a decrease in the number of cancer cells, a decrease in the number of metastases, an increase in life expectancy, decrease in cancer cell proliferation, decrease in cancer cell survival, or amelioration of various physiological symptoms associated with the cancerous condition. An “anti-cancer effect” can also be manifested by the ability of the peptides, polynucleotides, cells and antibodies in prevention of the occurrence of cancer in the first place. The term “anti-tumor effect” refers to a biological effect which can be manifested by various means, including but not limited to, e.g., a decrease in tumor volume, a decrease in the number of tumor cells, a decrease in tumor cell proliferation, or a decrease in tumor cell survival. The term “autologous” refers to any material derived from the same individual to whom it is later to be re-introduced into the individual.

[0186] The term “allogeneic” refers to any material derived from a different animal of the same species as the individual to whom the material is introduced. Two or more individuals are said to be allogeneic to one another when the genes at one or more loci are not identical. In some aspects, allogeneic material from individuals of the same species may be sufficiently unlike genetically to interact antigenically

[0187] The term “xenogeneic” refers to a graft derived from an animal of a different species.

[0188] The term “apheresis” as used herein refers to the art-recognized extracorporeal process by which the blood of a donor or patient is removed from the donor or patient and passed through an apparatus that separates out selected particular constituent(s) and returns the remainder to the circulation of the donor or patient, e.g., by retransfusion. Thus, in the context of “an apheresis sample” refers to a sample obtained using apheresis.

[0189] The term “combination” refers to either a fixed combination in one dosage unit form, or a combined administration where a compound of the present invention and a combination partner (e.g. another drug as explained below, also referred to as “therapeutic agent” or “co-agent”) may be administered independently at the same time or separately within time intervals, especially where these time intervals allow that the combination partners show a cooperative, e.g. synergistic effect. The single components may be packaged in a kit or separately. One or both of the components (e.g., powders or liquids) may be reconstituted or diluted to a desired dose prior to administration. The terms “co-administration” or “combined administration” or the like as utilized herein are meant to encompass administration of the selected combination partner to a single subject in need thereof (e.g. a patient), and are intended to include treatment regimens in which the agents are not necessarily administered by the same route of administration or at the same time. The term “pharmaceutical combination” as used herein means a product that results from the mixing or combining of more than one active ingredient and includes both fixed and non-fixed combinations of the active ingredients. The term “fixed combination” means that the active ingredients, e.g. a compound of the present invention and a combination partner, are both administered to a patient simultaneously in the form of a single entity or dosage. The term “non-fixed combination” means that the active ingredients, e.g. a compound of the present invention and a combination partner, are both administered to a patient as separate entities either simultaneously, concurrently or sequentially with no specific time limits, wherein such administration provides therapeutically effective levels of the two compounds in the body of the patient. The latter also applies to cocktail therapy, e.g. the administration of three or more active ingredients.

[0190] The term “cancer” refers to a disease characterized by the rapid and uncontrolled growth of aberrant cells. Cancer cells can spread locally or through the bloodstream and lymphatic system to other parts of the body. Examples of various cancers are described herein and include but are not limited to, breast cancer, prostate cancer, ovarian cancer, cervical cancer, skin cancer, pancreatic cancer, colorectal cancer, renal cancer, liver cancer, brain cancer, lymphoma, leukemia, lung cancer and the like. Preferred cancers treated by the methods described herein include multiple myeloma, Hodgkin's lymphoma or non-Hodgkin's lymphoma.

[0191] The terms “tumor” and “cancer” are used interchangeably herein, e.g., both terms encompass solid and liquid, e.g., diffuse or circulating, tumors. As used herein, the term “cancer” or “tumor” includes premalignant, as well as malignant cancers and tumors.

[0192] “Derived from” as that term is used herein, indicates a relationship between a first and a second molecule. It generally refers to structural similarity between the first molecule and a second molecule and does not connotate or include a process or source limitation on a first molecule that is derived from a second molecule. For example, in the case of an intracellular signaling domain that is derived from a CD3zeta molecule, the intracellular signaling domain retains sufficient CD3zeta structure such that is has the required function, namely, the ability to generate a signal under the appropriate conditions. It does not connotate or include a limitation to a particular process of producing the intracellular signaling domain, e.g., it does not mean that, to provide the intracellular signaling domain, one must start with a CD3zeta sequence and delete unwanted sequence, or impose mutations, to arrive at the intracellular signaling domain.

[0193] The phrase “disease associated with expression of BCMA” includes, but is not limited to, a disease associated with a cell which expresses BCMA (e.g., wild-type or mutant BCMA) or condition associated with a cell which expresses BCMA (e.g., wild-type or mutant BCMA) including, e.g., proliferative diseases such as a cancer or malignancy or a precancerous condition such as a myelodysplasia, a myelodysplastic syndrome or a preleukemia; or a noncancer related indication associated with a cell which expresses BCMA (e.g., wild-type or mutant BCMA). For the avoidance of doubt, a disease associated with expression of BCMA may include a condition associated with a cell which does not presently express BCMA, e.g., because BCMA expression has been downregulated, e.g., due to treatment with a molecule targeting BCMA, e.g., a BCMA inhibitor described herein, but which at one time expressed BCMA. In one aspect, a cancer associated with expression of BCMA (e.g., wild-type or mutant BCMA) is a hematological cancer. In one aspect, the hematogical cancer is a leukemia or a lymphoma. In one aspect, a cancer associated with expression of BCMA (e.g., wild-type or mutant BCMA) is a malignancy of differentiated plasma B cells. In one aspect, a cancer associated with expression of BCMA (e.g., wild-type or mutant BCMA) includes cancers and malignancies including, but not limited to, e.g., one or more acute leukemias including but not limited to, e.g., B-cell acute Lymphoid Leukemia (“BALL”), T-cell acute Lymphoid Leukemia (“TALL”), acute lymphoid leukemia (ALL); one or more chronic leukemias including but not limited to, e.g., chronic myelogenous leukemia (CML), Chronic Lymphoid Leukemia (CLL). Additional cancers or hematologic conditions associated with expression of BMCA (e.g., wild-type or mutant BCMA) comprise, but are not limited to, e.g., B cell prolymphocytic leukemia, blastic plasmacytoid dendritic cell neoplasm, Burkitt's lymphoma, diffuse large B cell lymphoma, Follicular lymphoma, Hairy cell leukemia, small cell- or a large cell-follicular lymphoma, malignant lymphoproliferative conditions, MALT lymphoma, mantle cell lymphoma, Marginal zone lymphoma, multiple myeloma, myelodysplasia and myelodysplastic syndrome, non-Hodgkin's lymphoma, plasmablastic lymphoma, plasmacytoid dendritic cell neoplasm, Waldenstrom macroglobulinemia, and “preleukemia” which are a diverse collection of hematological conditions united by ineffective production (or dysplasia) of myeloid blood cells, and the like. In some embodiments, the cancer is multiple myeloma, Hodgkin's lymphoma, non-Hodgkin's lymphoma, or glioblastoma. In embodiments, a disease associated with expression of BCMA includes a plasma cell proliferative disorder, e.g., asymptomatic myeloma (smoldering multiple myeloma or indolent myeloma), monoclonal gammapathy of undetermined significance (MGUS), Waldenstrom's macroglobulinemia, plasmacytomas (e.g., plasma cell dyscrasia, solitary myeloma, solitary plasmacytoma, extramedullary plasmacytoma, and multiple plasmacytoma), systemic amyloid light chain amyloidosis, and POEMS syndrome (also known as Crow-Fukase syndrome, Takatsuki disease, and PEP syndrome). Further diseases associated with expression of BCMA (e.g., wild-type or mutant BCMA) expression include, but not limited to, e.g., atypical and/or non-classical cancers, malignancies, precancerous conditions or proliferative diseases associated with expression of BCMA (e.g., wild-type or mutant BCMA), e.g., a cancer described herein, e.g., a prostate cancer (e.g., castrate-resistant or therapy-resistant prostate cancer, or metastatic prostate cancer), pancreatic cancer, or lung cancer.

[0194] Non-cancer related conditions that are associated with BCMA (e.g., wild-type or mutant BCMA) include viral infections; e.g., HIV, fungal invections, e.g., C. neoformans; autoimmune disease; e.g. rheumatoid arthritis, system lupus erythematosus (SLE or lupus), pemphigus vulgaris, and Sjogren's syndrome; inflammatory bowel disease, ulcerative colitis; transplant-related allospecific immunity disorders related to mucosal immunity; and unwanted immune responses towards biologics (e.g., Factor VIII) where humoral immunity is important. In embodiments, a non-cancer related indication associated with expression of BCMA includes but is not limited to, e.g., autoimmune disease, (e.g., lupus), inflammatory disorders (allergy and asthma) and transplantation. In some embodiments, the tumor antigen-expressing cell expresses, or at any time expressed, mRNA encoding the tumor antigen. In an embodiment, the tumor antigen-expressing cell produces the tumor antigen protein (e.g., wild-type or mutant), and the tumor antigen protein may be present at normal levels or reduced levels. In an embodiment, the tumor antigen-expressing cell produced detectable levels of a tumor antigen protein at one point, and subsequently produced substantially no detectable tumor antigen protein.

[0195] The term “conservative sequence modifications” refers to amino acid modifications that do not significantly affect or alter the binding characteristics of the antibody or antibody fragment containing the amino acid sequence. Such conservative modifications include amino acid substitutions, additions and deletions. Modifications can be introduced into an antibody or antibody fragment of the invention by standard techniques known in the art, such as site-directed mutagenesis and PCR-mediated mutagenesis. Conservative substitutions are ones in which the amino acid residue is replaced with an amino acid residue having a similar side chain. Families of amino acid residues having similar side chains have been defined in the art. These families include amino acids with basic side chains (e.g., lysine, arginine, histidine), acidic side chains (e.g., aspartic acid, glutamic acid), uncharged polar side chains (e.g., glycine, asparagine, glutamine, serine, threonine, tyrosine, cysteine, tryptophan), nonpolar side chains (e.g., alanine, valine, leucine, isoleucine, proline, phenylalanine, methionine), beta-branched side chains (e.g., threonine, valine, isoleucine) and aromatic side chains (e.g., tyrosine, phenylalanine, tryptophan, histidine). Thus, one or more amino acid residues within a CAR of the invention can be replaced with other amino acid residues from the same side chain family and the altered CAR can be tested using the functional assays described herein.

[0196] The term “stimulation,” refers to a primary response induced by binding of a stimulatory molecule (e.g., a TCR/CD3 complex) with its cognate ligand thereby mediating a signal transduction event, such as, but not limited to, signal transduction via the TCR/CD3 complex. Stimulation can mediate altered expression of certain molecules, such as downregulation of TGF-β, and/or reorganization of cytoskeletal structures, and the like.

[0197] The term “stimulatory molecule,” refers to a molecule expressed by a T cell that provides the primary cytoplasmic signaling sequence(s) that regulate primary activation of the TCR complex in a stimulatory way for at least some aspect of the T cell signaling pathway. In some embodiments, the ITAM-containing domain within the CAR recapitulates the signaling of the primary TCR independently of endogenous TCR complexes. In one aspect, the primary signal is initiated by, for instance, binding of a TCR/CD3 complex with an MHC molecule loaded with peptide, and which leads to mediation of a T cell response, including, but not limited to, proliferation, activation, differentiation, and the like. A primary cytoplasmic signaling sequence (also referred to as a “primary signaling domain”) that acts in a stimulatory manner may contain a signaling motif which is known as immunoreceptor tyrosine-based activation motif or ITAM. Examples of an ITAM containing primary cytoplasmic signaling sequence that is of particular use in the invention includes, but is not limited to, those derived from TCR zeta, FcR gamma, FcR beta, CD3 gamma, CD3 delta, CD3 epsilon, CD5, CD22, CD79a, CD79b, CD278 (also known as “ICOS”), FcεRI and CD66d, DAP10 and DAP12. In a specific CAR of the invention, the intracellular signaling domain in any one or more CARS of the invention comprises an intracellular signaling sequence, e.g., a primary signaling sequence of CD3-zeta. In a specific CAR of the invention, the primary signaling sequence of CD3-zeta is the sequence provided as SEQ ID NO:9, or the equivalent residues from a non-human species, e.g., mouse, rodent, monkey, ape and the like. In a specific CAR of the invention, the primary signaling sequence of CD3-zeta is the sequence as provided in SEQ ID NO:10, or the equivalent residues from a non-human species, e.g., mouse, rodent, monkey, ape and the like. The term “antigen presenting cell” or “APC” refers to an immune system cell such as an accessory cell (e.g., a B-cell, a dendritic cell, and the like) that displays a foreign antigen complexed with major histocompatibility complexes (MHC's) on its surface. T-cells may recognize these complexes using their T-cell receptors (TCRs). APCs process antigens and present them to T-cells.

[0198] An “intracellular signaling domain,” as the term is used herein, refers to an intracellular portion of a molecule. In embodiments, the intracellular signal domain transduces the effector function signal and directs the cell to perform a specialized function. While the entire intracellular signaling domain can be employed, in many cases it is not necessary to use the entire chain. To the extent that a truncated portion of the intracellular signaling domain is used, such truncated portion may be used in place of the intact chain as long as it transduces the effector function signal. The term intracellular signaling domain is thus meant to include any truncated portion of the intracellular signaling domain sufficient to transduce the effector function signal.

[0199] The intracellular signaling domain generates a signal that promotes an immune effector function of the CAR containing cell, e.g., a CART cell. Examples of immune effector function, e.g., in a CART cell, include cytolytic activity and helper activity, including the secretion of cytokines.

[0200] In an embodiment, the intracellular signaling domain can comprise a primary intracellular signaling domain. Exemplary primary intracellular signaling domains include those derived from the molecules responsible for primary stimulation, or antigen dependent simulation. In an embodiment, the intracellular signaling domain can comprise a costimulatory intracellular domain. Exemplary costimulatory intracellular signaling domains include those derived from molecules responsible for costimulatory signals, or antigen independent stimulation. For example, in the case of a CART, a primary intracellular signaling domain can comprise a cytoplasmic sequence of a T cell receptor, and a costimulatory intracellular signaling domain can comprise cytoplasmic sequence from co-receptor or costimulatory molecule.

[0201] A primary intracellular signaling domain can comprise a signaling motif which is known as an immunoreceptor tyrosine-based activation motif or ITAM. Examples of ITAM containing primary cytoplasmic signaling sequences include, but are not limited to, those derived from CD3 zeta, FcR gamma, FcR beta, CD3 gamma, CD3 delta, CD3 epsilon, CD5, CD22, CD79a, CD79b, CD278 (also known as “ICOS”), FcεRI, CD66d, DAP10 and DAP12.

[0202] The term “zeta” or alternatively “zeta chain”, “CD3-zeta” or “TCR-zeta” is defined as the protein provided as GenBan Acc. No. BAG36664.1, or the equivalent residues from a non-human species, e.g., mouse, rodent, monkey, ape and the like, and a “zeta stimulatory domain” or alternatively a “CD3-zeta stimulatory domain” or a “TCR-zeta stimulatory domain” is defined as the amino acid residues from the cytoplasmic domain of the zeta chain that are sufficient to functionally transmit an initial signal necessary for T cell activation. In one aspect the cytoplasmic domain of zeta comprises residues 52 through 164 of GenBank Acc. No. BAG36664.1 or the equivalent residues from a non-human species, e.g., mouse, rodent, monkey, ape and the like, that are functional orthologs thereof. In one aspect, the “zeta stimulatory domain” or a “CD3-zeta stimulatory domain” is the sequence provided as SEQ ID NO:9. In one aspect, the “zeta stimulatory domain” or a “CD3-zeta stimulatory domain” is the sequence provided as SEQ ID NO:10.

[0203] The term “costimulatory molecule” refers to the cognate binding partner on a T cell that specifically binds with a costimulatory ligand, thereby mediating a costimulatory response by the T cell, such as, but not limited to, proliferation. Costimulatory molecules are cell surface molecules other than antigen receptors or their ligands that are required for an efficient immune response. Costimulatory molecules include, but are not limited to an MHC class I molecule, TNF receptor proteins, Immunoglobulin-like proteins, cytokine receptors, integrins, signaling lymphocytic activation molecules (SLAM proteins), activating NK cell receptors, BTLA, Toll ligand receptor, OX40, CD2, CD7, CD27, CD28, CD30, CD40, CDS, ICAM-1, LFA-1 (CD11a/CD18), 4-1BB (CD137), B7-H3, CDS, ICAM-1, ICOS (CD278), GITR, BAFFR, LIGHT, HVEM (LIGHTR), KIRDS2, SLAMF7, NKp80 (KLRF1), NKp44, NKp30, NKp46, CD19, CD4, CD8alpha, CD8beta, IL2R beta, IL2R gamma, IL7R alpha, ITGA4, VLA1, CD49a, ITGA4, IA4, CD49D, ITGA6, VLA-6, CD49f, ITGAD, CD11d, ITGAE, CD103, ITGAL, CD11a, LFA-1, ITGAM, CD11b, ITGAX, CD11c, ITGB1, CD29, ITGB2, CD18, LFA-1, ITGB7, NKG2D, NKG2C, TNFR2, TRANCE/RANKL, DNAM1 (CD226), SLAMF4 (CD244, 2B4), CD84, CD96 (Tactile), CEACAM1, CRTAM, Ly9 (CD229), CD160 (BY55), PSGL1, CD100 (SEMA4D), CD69, SLAMF6 (NTB-A, Ly108), SLAM (SLAMF1, CD150, IPO-3), BLAME (SLAMF8), SELPLG (CD162), LTBR, LAT, GADS, SLP-76, PAG/Cbp, CD19a, and a ligand that specifically binds with CD83.

[0204] A costimulatory intracellular signaling domain refers to the intracellular portion of a costimulatory molecule.

[0205] The intracellular signaling domain can comprise the entire intracellular portion, or the entire native intracellular signaling domain, of the molecule from which it is derived, or a functional fragment thereof.

[0206] The term “4-1BB” refers to a member of the TNFR superfamily with an amino acid sequence provided as GenBank Acc. No. AAA62478.2, or the equivalent residues from a non-human species, e.g., mouse, rodent, monkey, ape and the like; and a “4-1BB costimulatory domain” is defined as amino acid residues 214-255 of GenBank Acc. No. AAA62478.2, or the equivalent residues from a non-human species, e.g., mouse, rodent, monkey, ape and the like. In one aspect, the “4-1BB costimulatory domain” is the sequence provided as SEQ ID NO:7 or the equivalent residues from a non-human species, e.g., mouse, rodent, monkey, ape and the like.

[0207] “Immune effector cell,” as that term is used herein, refers to a cell that is involved in an immune response, e.g., in the promotion of an immune effector response. Examples of immune effector cells include T cells, e.g., alpha/beta T cells and gamma/delta T cells, B cells, natural killer (NK) cells, natural killer T (NKT) cells, mast cells, and myeloic-derived phagocytes.

[0208] “Immune effector function or immune effector response,” as that term is used herein, refers to function or response, e.g., of an immune effector cell, that enhances or promotes an immune attack of a target cell. E.g., an immune effector function or response refers a property of a T or NK cell that promotes killing or the inhibition of growth or proliferation, of a target cell. In the case of a T cell, primary stimulation and co-stimulation are examples of immune effector function or response.

[0209] The term “effector function” refers to a specialized function of a cell. Effector function of a T cell, for example, may be cytolytic activity or helper activity including the secretion of cytokines.

[0210] The term “encoding” refers to the inherent property of specific sequences of nucleotides in a polynucleotide, such as a gene, a cDNA, or an mRNA, to serve as templates for synthesis of other polymers and macromolecules in biological processes having either a defined sequence of nucleotides (e.g., rRNA, tRNA and mRNA) or a defined sequence of amino acids and the biological properties resulting therefrom. Thus, a gene, cDNA, or RNA, encodes a protein if transcription and translation of mRNA corresponding to that gene produces the protein in a cell or other biological system. Both the coding strand, the nucleotide sequence of which is identical to the mRNA sequence and is usually provided in sequence listings, and the non-coding strand, used as the template for transcription of a gene or cDNA, can be referred to as encoding the protein or other product of that gene or cDNA.

[0211] Unless otherwise specified, a “nucleotide sequence encoding an amino acid sequence” includes all nucleotide sequences that are degenerate versions of each other and that encode the same amino acid sequence. The phrase nucleotide sequence that encodes a protein or a RNA may also include introns to the extent that the nucleotide sequence encoding the protein may in some version contain an intron(s).

[0212] The term “effective amount” or “therapeutically effective amount” are used interchangeably herein, and refer to an amount of a compound, formulation, material, or composition, as described herein effective to achieve a particular biological result.

[0213] The term “endogenous” refers to any material from or produced inside an organism, cell, tissue or system.

[0214] The term “exogenous” refers to any material introduced from or produced outside an organism, cell, tissue or system.

[0215] The term “expression” refers to the transcription and/or translation of a particular nucleotide sequence driven by a promoter.

[0216] The term “transfer vector” refers to a composition of matter which comprises an isolated nucleic acid and which can be used to deliver the isolated nucleic acid to the interior of a cell. Numerous vectors are known in the art including, but not limited to, linear polynucleotides, polynucleotides associated with ionic or amphiphilic compounds, plasmids, and viruses. Thus, the term “transfer vector” includes an autonomously replicating plasmid or a virus. The term should also be construed to further include non-plasmid and non-viral compounds which facilitate transfer of nucleic acid into cells, such as, for example, a polylysine compound, liposome, and the like. Examples of viral transfer vectors include, but are not limited to, adenoviral vectors, adeno-associated virus vectors, retroviral vectors, lentiviral vectors, and the like.

[0217] The term “expression vector” refers to a vector comprising a recombinant polynucleotide comprising expression control sequences operatively linked to a nucleotide sequence to be expressed. An expression vector comprises sufficient cis-acting elements for expression; other elements for expression can be supplied by the host cell or in an in vitro expression system. Expression vectors include all those known in the art, including cosmids, plasmids (e.g., naked or contained in liposomes) and viruses (e.g., lentiviruses, retroviruses, adenoviruses, and adeno-associated viruses) that incorporate the recombinant polynucleotide.

[0218] The term “lentivirus” refers to a genus of the Retroviridae family. Lentiviruses are unique among the retroviruses in being able to infect non-dividing cells; they can deliver a significant amount of genetic information into the DNA of the host cell, so they are one of the most efficient methods of a gene delivery vector. HIV, SIV, and FIV are all examples of lentiviruses.

[0219] The term “lentiviral vector” refers to a vector derived from at least a portion of a lentivirus genome, including especially a self-inactivating lentiviral vector as provided in Milone et al., Mol. Ther. 17(8): 1453-1464 (2009). Other examples of lentivirus vectors that may be used in the clinic, include but are not limited to, e.g., the LENTIVECTOR® gene delivery technology from Oxford BioMedica, the LENTIMAX™ vector system from Lentigen and the like. Nonclinical types of lentiviral vectors are also available and would be known to one skilled in the art.

[0220] The term “homologous” or “identity” refers to the subunit sequence identity between two polymeric molecules, e.g., between two nucleic acid molecules, such as, two DNA molecules or two RNA molecules, or between two polypeptide molecules. When a subunit position in both of the two molecules is occupied by the same monomeric subunit; e.g., if a position in each of two DNA molecules is occupied by adenine, then they are homologous or identical at that position. The homology between two sequences is a direct function of the number of matching or homologous positions; e.g., if half (e.g., five positions in a polymer ten subunits in length) of the positions in two sequences are homologous, the two sequences are 50% homologous; if 90% of the positions (e.g., 9 of 10), are matched or homologous, the two sequences are 90% homologous.

[0221] “Humanized” forms of non-human (e.g., murine) antibodies are chimeric immunoglobulins, immunoglobulin chains or fragments thereof (such as Fv, Fab, Fab′, F(ab′)2 or other antigen-binding subsequences of antibodies) which contain minimal sequence derived from non-human immunoglobulin. For the most part, humanized antibodies and antibody fragments thereof are human immunoglobulins (recipient antibody or antibody fragment) in which residues from a complementary-determining region (CDR) of the recipient are replaced by residues from a CDR of a non-human species (donor antibody) such as mouse, rat or rabbit having the desired specificity, affinity, and capacity. In some instances, Fv framework region (FR) residues of the human immunoglobulin are replaced by corresponding non-human residues. Furthermore, a humanized antibody/antibody fragment can comprise residues which are found neither in the recipient antibody nor in the imported CDR or framework sequences. These modifications can further refine and optimize antibody or antibody fragment performance. In general, the humanized antibody or antibody fragment thereof will comprise substantially all of at least one, and typically two, variable domains, in which all or substantially all of the CDR regions correspond to those of a non-human immunoglobulin and all or a significant portion of the FR regions are those of a human immunoglobulin sequence. The humanized antibody or antibody fragment can also comprise at least a portion of an immunoglobulin constant region (Fc), typically that of a human immunoglobulin. For further details, see Jones et al., Nature, 321: 522-525, 1986; Reichmann et al., Nature, 332: 323-329, 1988; Presta, Curr. Op. Struct. Biol., 2: 593-596, 1992.

[0222] “Fully human” refers to an immunoglobulin, such as an antibody or antibody fragment, where the whole molecule is of human origin or consists of an amino acid sequence identical to a human form of the antibody or immunoglobulin.

[0223] The term “isolated” means altered or removed from the natural state. For example, a nucleic acid or a peptide naturally present in a living animal is not “isolated,” but the same nucleic acid or peptide partially or completely separated from the coexisting materials of its natural state is “isolated.” An isolated nucleic acid or protein can exist in substantially purified form, or can exist in a non-native environment such as, for example, a host cell.

[0224] In the context of the present invention, the following abbreviations for the commonly occurring nucleic acid bases are used. “A” refers to adenosine, “C” refers to cytosine, “G” refers to guanosine, “T” refers to thymidine, and “U” refers to uridine.

[0225] The term “operably linked” or “transcriptional control” refers to functional linkage between a regulatory sequence and a heterologous nucleic acid sequence resulting in expression of the latter. For example, a first nucleic acid sequence is operably linked with a second nucleic acid sequence when the first nucleic acid sequence is placed in a functional relationship with the second nucleic acid sequence. For instance, a promoter is operably linked to a coding sequence if the promoter affects the transcription or expression of the coding sequence. Operably linked DNA sequences can be contiguous with each other and, e.g., where necessary to join two protein coding regions, are in the same reading frame.

[0226] The term “parenteral” administration of an immunogenic composition includes, e.g., subcutaneous (s.c.), intravenous (i.v.), intramuscular (i.m.), or intrasternal injection, intratumoral, or infusion techniques.

[0227] The term “nucleic acid” or “polynucleotide” refers to deoxyribonucleic acids (DNA) or ribonucleic acids (RNA) and polymers thereof in either single- or double-stranded form. Unless specifically limited, the term encompasses nucleic acids containing known analogues of natural nucleotides that have similar binding properties as the reference nucleic acid and are metabolized in a manner similar to naturally occurring nucleotides. Unless otherwise indicated, a particular nucleic acid sequence also implicitly encompasses conservatively modified variants thereof (e.g., degenerate codon substitutions, e.g., conservative substitutions), alleles, orthologs, SNPs, and complementary sequences as well as the sequence explicitly indicated. Specifically, degenerate codon substitutions, e.g., conservative substitutions may be achieved by generating sequences in which the third position of one or more selected (or all) codons is substituted with mixed-base and/or deoxyinosine residues (Batzer et al., Nucleic Acid Res. 19:5081 (1991); Ohtsuka et al., J. Biol. Chem. 260:2605-2608 (1985); and Rossolini et al., Mol. Cell. Probes 8:91-98 (1994)).

[0228] The terms “peptide,” “polypeptide,” and “protein” are used interchangeably, and refer to a compound comprised of amino acid residues covalently linked by peptide bonds. A protein or peptide must contain at least two amino acids, and no limitation is placed on the maximum number of amino acids that can comprise a protein's or peptide's sequence. Polypeptides include any peptide or protein comprising two or more amino acids joined to each other by peptide bonds. As used herein, the term refers to both short chains, which also commonly are referred to in the art as peptides, oligopeptides and oligomers, for example, and to longer chains, which generally are referred to in the art as proteins, of which there are many types. “Polypeptides” include, for example, biologically active fragments, substantially homologous polypeptides, oligopeptides, homodimers, heterodimers, variants of polypeptides, modified polypeptides, derivatives, analogs, fusion proteins, among others. A polypeptide includes a natural peptide, a recombinant peptide, or a combination thereof.

[0229] The term “promoter” refers to a DNA sequence recognized by the synthetic machinery of the cell, or introduced synthetic machinery, required to initiate the specific transcription of a polynucleotide sequence.

[0230] The term “promoter/regulatory sequence” refers to a nucleic acid sequence which is required for expression of a gene product operably linked to the promoter/regulatory sequence. In some instances, this sequence may be the core promoter sequence and in other instances, this sequence may also include an enhancer sequence and other regulatory elements which are required for expression of the gene product. The promoter/regulatory sequence may, for example, be one which expresses the gene product in a tissue specific manner.

[0231] The term “constitutive” promoter refers to a nucleotide sequence which, when operably linked with a polynucleotide which encodes or specifies a gene product, causes the gene product to be produced in a cell under most or all physiological conditions of the cell.

[0232] The term “inducible” promoter refers to a nucleotide sequence which, when operably linked with a polynucleotide which encodes or specifies a gene product, causes the gene product to be produced in a cell substantially only when an inducer which corresponds to the promoter is present in the cell.

[0233] The term “tissue-specific” promoter refers to a nucleotide sequence which, when operably linked with a polynucleotide encodes or specified by a gene, causes the gene product to be produced in a cell substantially only if the cell is a cell of the tissue type corresponding to the promoter.

[0234] The terms “cancer associated antigen” or “tumor antigen” interchangeably refers to a molecule (typically a protein, carbohydrate or lipid) that is expressed on the surface of a cancer cell, either entirely or as a fragment (e.g., MHC/peptide), and which is useful for the preferential targeting of a pharmacological agent to the cancer cell. In some embodiments, a tumor antigen is a marker expressed by both normal cells and cancer cells, e.g., a lineage marker, e.g., CD19 on B cells. In some embodiments, a tumor antigen is a cell surface molecule that is overexpressed in a cancer cell in comparison to a normal cell, for instance, 1-fold over expression, 2-fold overexpression, 3-fold overexpression or more in comparison to a normal cell. In some embodiments, a tumor antigen is a cell surface molecule that is inappropriately synthesized in the cancer cell, for instance, a molecule that contains deletions, additions or mutations in comparison to the molecule expressed on a normal cell. In some embodiments, a tumor antigen will be expressed exclusively on the cell surface of a cancer cell, entirely or as a fragment (e.g., MHC/peptide), and not synthesized or expressed on the surface of a normal cell. In some embodiments, the CARs of the present invention includes CARs comprising an antigen binding domain (e.g., antibody or antibody fragment) that binds to a MHC presented peptide. Normally, peptides derived from endogenous proteins fill the pockets of Major histocompatibility complex (MHC) class I molecules, and are recognized by T cell receptors (TCRs) on CD8+ T lymphocytes. The MHC class I complexes are constitutively expressed by all nucleated cells. In cancer, virus-specific and/or tumor-specific peptide/MHC complexes represent a unique class of cell surface targets for immunotherapy. TCR-like antibodies targeting peptides derived from viral or tumor antigens in the context of human leukocyte antigen (HLA)-A1 or HLA-A2 have been described (see, e.g., Sastry et al., J Virol. 2011 85(5):1935-1942; Sergeeva et al., Blood, 2011 117(16):4262-4272; Verma et al., J Immunol 2010 184(4):2156-2165; Willemsen et al., Gene Ther 2001 8(21):1601-1608; Dao et al., Sci Transl Med 2013 5(176):176ra33; Tassev et al., Cancer Gene Ther 2012 19(2):84-100). For example, TCR-like antibody can be identified from screening a library, such as a human scFv phage displayed library.

[0235] The term “tumor-supporting antigen” or “cancer-supporting antigen” interchangeably refer to a molecule (typically a protein, carbohydrate or lipid) that is expressed on the surface of a cell that is, itself, not cancerous, but supports the cancer cells, e.g., by promoting their growth or survival e.g., resistance to immune cells. Exemplary cells of this type include stromal cells and myeloid-derived suppressor cells (MDSCs). The tumor-supporting antigen itself need not play a role in supporting the tumor cells so long as the antigen is present on a cell that supports cancer cells.

[0236] The term “flexible polypeptide linker” or “linker” as used in the context of a scFv refers to a peptide linker that consists of amino acids such as glycine and/or serine residues used alone or in combination, to link variable heavy and variable light chain regions together. In one embodiment, the flexible polypeptide linker is a Gly/Ser linker and comprises the amino acid sequence (Gly-Gly-Gly-Ser)n (SEQ ID NO: 38), where n is a positive integer equal to or greater than 1. For example, n=1, n=2, n=3. n=4, n=5 and n=6, n=7, n=8, n=9 and n=10 In one embodiment, the flexible polypeptide linkers include, but are not limited to, (Gly₄ Ser)₄ (SEQ ID NO:27) or (Gly₄ Ser)₃ (SEQ ID NO:28). In another embodiment, the linkers include multiple repeats of (Gly₂Ser), (GlySer) or (Gly₃Ser) (SEQ ID NO:29). Also included within the scope of the invention are linkers described in WO2012/138475, incorporated herein by reference).

[0237] As used herein, a 5′ cap (also termed an RNA cap, an RNA 7-methylguanosine cap or an RNA m⁷G cap) is a modified guanine nucleotide that has been added to the “front” or 5′ end of a eukaryotic messenger RNA shortly after the start of transcription. The 5′ cap consists of a terminal group which is linked to the first transcribed nucleotide. Its presence is critical for recognition by the ribosome and protection from RNases. Cap addition is coupled to transcription, and occurs co-transcriptionally, such that each influences the other. Shortly after the start of transcription, the 5′ end of the mRNA being synthesized is bound by a cap-synthesizing complex associated with RNA polymerase. This enzymatic complex catalyzes the chemical reactions that are required for mRNA capping. Synthesis proceeds as a multi-step biochemical reaction. The capping moiety can be modified to modulate functionality of mRNA such as its stability or efficiency of translation.

[0238] As used herein, “in vitro transcribed RNA” refers to RNA, preferably mRNA, that has been synthesized in vitro. Generally, the in vitro transcribed RNA is generated from an in vitro transcription vector. The in vitro transcription vector comprises a template that is used to generate the in vitro transcribed RNA.

[0239] As used herein, a “poly(A)” is a series of adenosines attached by polyadenylation to the mRNA. In the preferred embodiment of a construct for transient expression, the polyA is between 50 and 5000 (SEQ ID NO: 30), preferably greater than 64, more preferably greater than 100, most preferably greater than 300 or 400. poly(A) sequences can be modified chemically or enzymatically to modulate mRNA functionality such as localization, stability or efficiency of translation.

[0240] As used herein, “polyadenylation” refers to the covalent linkage of a polyadenylyl moiety, or its modified variant, to a messenger RNA molecule. In eukaryotic organisms, most messenger RNA (mRNA) molecules are polyadenylated at the 3′ end. The 3′ poly(A) tail is a long sequence of adenine nucleotides (often several hundred) added to the pre-mRNA through the action of an enzyme, polyadenylate polymerase. In higher eukaryotes, the poly(A) tail is added onto transcripts that contain a specific sequence, the polyadenylation signal. The poly(A) tail and the protein bound to it aid in protecting mRNA from degradation by exonucleases. Polyadenylation is also important for transcription termination, export of the mRNA from the nucleus, and translation. Polyadenylation occurs in the nucleus immediately after transcription of DNA into RNA, but additionally can also occur later in the cytoplasm. After transcription has been terminated, the mRNA chain is cleaved through the action of an endonuclease complex associated with RNA polymerase. The cleavage site is usually characterized by the presence of the base sequence AAUAAA near the cleavage site. After the mRNA has been cleaved, adenosine residues are added to the free 3′ end at the cleavage site.

[0241] As used herein, “transient” refers to expression of a non-integrated transgene for a period of hours, days or weeks, wherein the period of time of expression is less than the period of time for expression of the gene if integrated into the genome or contained within a stable plasmid replicon in the host cell.

[0242] As used herein, the terms “treat”, “treatment” and “treating” refer to the reduction or amelioration of the progression, severity and/or duration of a proliferative disorder, or the amelioration of one or more symptoms (preferably, one or more discernible symptoms) of a proliferative disorder resulting from the administration of one or more therapies (e.g., one or more therapeutic agents such as a CAR of the invention). In specific embodiments, the terms “treat”, “treatment” and “treating” refer to the amelioration of at least one measurable physical parameter of a proliferative disorder, such as growth of a tumor, not necessarily discernible by the patient. In other embodiments the terms “treat”, “treatment” and “treating”-refer to the inhibition of the progression of a proliferative disorder, either physically by, e.g., stabilization of a discernible symptom, physiologically by, e.g., stabilization of a physical parameter, or both. In other embodiments the terms “treat”, “treatment” and “treating” refer to the reduction or stabilization of tumor size or cancerous cell count.

[0243] The term “signal transduction pathway” refers to the biochemical relationship between a variety of signal transduction molecules that play a role in the transmission of a signal from one portion of a cell to another portion of a cell. The phrase “cell surface receptor” includes molecules and complexes of molecules capable of receiving a signal and transmitting signal across the membrane of a cell.

[0244] The term “subject” is intended to include living organisms in which an immune response can be elicited (e.g., mammals, human).

[0245] The term, a “substantially purified” cell refers to a cell that is essentially free of other cell types. A substantially purified cell also refers to a cell which has been separated from other cell types with which it is normally associated in its naturally occurring state. In some instances, a population of substantially purified cells refers to a homogenous population of cells. In other instances, this term refers simply to cell that have been separated from the cells with which they are naturally associated in their natural state. In some aspects, the cells are cultured in vitro. In other aspects, the cells are not cultured in vitro.

[0246] The term “therapeutic” as used herein means a treatment. A therapeutic effect is obtained by reduction, suppression, remission, or eradication of a disease state.

[0247] The term “prophylaxis” as used herein means the prevention of or protective treatment for a disease or disease state.

[0248] In the context of the present invention, “tumor antigen” or “hyperproliferative disorder antigen” or “antigen associated with a hyperproliferative disorder” refers to antigens that are common to specific hyperproliferative disorders. In certain aspects, the hyperproliferative disorder antigens of the present invention are derived from, cancers including but not limited to primary or metastatic melanoma, thymoma, lymphoma, sarcoma, lung cancer, liver cancer, non-Hodgkin lymphoma, Hodgkin lymphoma, leukemias, uterine cancer, cervical cancer, bladder cancer, kidney cancer and adenocarcinomas such as breast cancer, prostate cancer (e.g., castrate-resistant or therapy-resistant prostate cancer, or metastatic prostate cancer), ovarian cancer, pancreatic cancer, and the like, or a plasma cell proliferative disorder, e.g., asymptomatic myeloma (smoldering multiple myeloma or indolent myeloma), monoclonal gammapathy of undetermined significance (MGUS), Waldenstrom's macroglobulinemia, plasmacytomas (e.g., plasma cell dyscrasia, solitary myeloma, solitary plasmacytoma, extramedullary plasmacytoma, and multiple plasmacytoma), systemic amyloid light chain amyloidosis, and POEMS syndrome (also known as Crow-Fukase syndrome, Takatsuki disease, and PEP syndrome).

[0249] The term “transfected” or “transformed” or “transduced” refers to a process by which exogenous nucleic acid is transferred or introduced into the host cell. A “transfected” or “transformed” or “transduced” cell is one which has been transfected, transformed or transduced with exogenous nucleic acid. The cell includes the primary subject cell and its progeny.

[0250] The term “specifically binds,” refers to an antibody, or a ligand, which recognizes and binds with a cognate binding partner (e.g., a stimulatory and/or costimulatory molecule present on a T cell) protein present in a sample, but which antibody or ligand does not substantially recognize or bind other molecules in the sample.

[0251] “Regulatable chimeric antigen receptor (RCAR),” as used herein, refers to a set of polypeptides, typically two in the simplest embodiments, which when in an immune effector cell, provides the cell with specificity for a target cell, typically a cancer cell, and with intracellular signal generation. In some embodiments, an RCAR comprises at least an extracellular antigen binding domain, a transmembrane domain and a cytoplasmic signaling domain (also referred to herein as “an intracellular signaling domain”) comprising a functional signaling domain derived from a stimulatory molecule and/or costimulatory molecule as defined herein in the context of a CAR molecule. In some embodiments, the set of polypeptides in the RCAR are not contiguous with each other, e.g., are in different polypeptide chains. In some embodiments, the RCAR includes a dimerization switch that, upon the presence of a dimerization molecule, can couple the polypeptides to one another, e.g., can couple an antigen binding domain to an intracellular signaling domain. In some embodiments, the RCAR is expressed in a cell (e.g., an immune effector cell) as described herein, e.g., an RCAR-expressing cell (also referred to herein as “RCARX cell”). In an embodiment the RCARX cell is a T cell, and is referred to as a RCART cell. In an embodiment the RCARX cell is an NK cell, and is referred to as a RCARN cell. The RCAR can provide the RCAR-expressing cell with specificity for a target cell, typically a cancer cell, and with regulatable intracellular signal generation or proliferation, which can optimize an immune effector property of the RCAR-expressing cell. In embodiments, an RCAR cell relies at least in part, on an antigen binding domain to provide specificity to a target cell that comprises the antigen bound by the antigen binding domain.

[0252] “Membrane anchor” or “membrane tethering domain”, as that term is used herein, refers to a polypeptide or moiety, e.g., a myristoyl group, sufficient to anchor an extracellular or intracellular domain to the plasma membrane.

[0253] “Switch domain,” as that term is used herein, e.g., when referring to an RCAR, refers to an entity, typically a polypeptide-based entity, that, in the presence of a dimerization molecule, associates with another switch domain. The association results in a functional coupling of a first entity linked to, e.g., fused to, a first switch domain, and a second entity linked to, e.g., fused to, a second switch domain. A first and second switch domain are collectively referred to as a dimerization switch. In embodiments, the first and second switch domains are the same as one another, e.g., they are polypeptides having the same primary amino acid sequence, and are referred to collectively as a homodimerization switch. In embodiments, the first and second switch domains are different from one another, e.g., they are polypeptides having different primary amino acid sequences, and are referred to collectively as a heterodimerization switch. In embodiments, the switch is intracellular. In embodiments, the switch is extracellular. In embodiments, the switch domain is a polypeptide-based entity, e.g., FKBP or FRB-based, and the dimerization molecule is small molecule, e.g., a rapalogue. In embodiments, the switch domain is a polypeptide-based entity, e.g., an scFv that binds a myc peptide, and the dimerization molecule is a polypeptide, a fragment thereof, or a multimer of a polypeptide, e.g., a myc ligand or multimers of a myc ligand that bind to one or more myc scFvs. In embodiments, the switch domain is a polypeptide-based entity, e.g., myc receptor, and the dimerization molecule is an antibody or fragments thereof, e.g., myc antibody.

[0254] “Dimerization molecule,” as that term is used herein, e.g., when referring to an RCAR, refers to a molecule that promotes the association of a first switch domain with a second switch domain. In embodiments, the dimerization molecule does not naturally occur in the subject, or does not occur in concentrations that would result in significant dimerization. In embodiments, the dimerization molecule is a small molecule, e.g., rapamycin or a rapalogue, e.g, RAD001.

[0255] The term “bioequivalent” refers to an amount of an agent other than the reference compound (e.g., RAD001), required to produce an effect equivalent to the effect produced by the reference dose or reference amount of the reference compound (e.g., RAD001). In an embodiment the effect is the level of mTOR inhibition, e.g., as measured by P70 S6 kinase inhibition, e.g., as evaluated in an in vivo or in vitro assay, e.g., as measured by an assay described herein, e.g., the Boulay assay, or measurement of phosphorylated S6 levels by western blot. In an embodiment, the effect is alteration of the ratio of PD-1 positive/PD-1 negative T cells, as measured by cell sorting. In an embodiment a bioequivalent amount or dose of an mTOR inhibitor is the amount or dose that achieves the same level of P70 S6 kinase inhibition as does the reference dose or reference amount of a reference compound. In an embodiment, a bioequivalent amount or dose of an mTOR inhibitor is the amount or dose that achieves the same level of alteration in the ratio of PD-1 positive/PD-1 negative T cells as does the reference dose or reference amount of a reference compound.

[0256] The term “low, immune enhancing, dose” when used in conjuction with an mTOR inhibitor, e.g., an allosteric mTOR inhibitor, e.g., RAD001 or rapamycin, or a catalytic mTOR inhibitor, refers to a dose of mTOR inhibitor that partially, but not fully, inhibits mTOR activity, e.g., as measured by the inhibition of P70 S6 kinase activity. Methods for evaluating mTOR activity, e.g., by inhibition of P70 S6 kinase, are discussed herein. The dose is insufficient to result in complete immune suppression but is sufficient to enhance the immune response. In an embodiment, the low, immune enhancing, dose of mTOR inhibitor results in a decrease in the number of PD-1 positive immune effector cells, e.g., T cells or NK cells, and/or an increase in the number of PD-1 negative immune effector cells, e.g., T cells or NK cells, or an increase in the ratio of PD-1 negative immune effector cells (e.g., T cells or NK cells)/PD-1 positive immune effector cells (e.g., T cells or NK cells).

[0257] In an embodiment, the low, immune enhancing, dose of mTOR inhibitor results in an increase in the number of naive T cells. In an embodiment, the low, immune enhancing, dose of mTOR inhibitor results in one or more of the following:
[0258] an increase in the expression of one or more of the following markers: CD62L^{high}, CD127^{high}, CD27⁺, and BCL2, e.g., on memory T cells, e.g., memory T cell precursors;
[0259] a decrease in the expression of KLRG1, e.g., on memory T cells, e.g., memory T cell precursors; and
[0260] an increase in the number of memory T cell precursors, e.g., cells with any one or combination of the following characteristics: increased CD62L^{high} increased CD127^{high}, increased CD27⁺, decreased KLRG1, and increased BCL2;

[0261] wherein any of the changes described above occurs, e.g., at least transiently, e.g., as compared to a non-treated subject.

[0262] “Refractory” as used herein refers to a disease, e.g., cancer, that does not respond to a treatment. In embodiments, a refractory cancer can be resistant to a treatment before or at the beginning of the treatment. In other embodiments, the refractory cancer can become resistant during a treatment. A refractory cancer is also called a resistant cancer.

[0263] “Relapsed” or a “relapse” as used herein refers to the reappearance of a disease (e.g., cancer) or the signs and symptoms of a disease such as cancer after a period of improvement or responsiveness, e.g., after prior treatment of a therapy, e.g., cancer therapy. For example, the period of responsiveness may involve the level of cancer cells falling below a certain threshold, e.g., below 20%, 1%, 10%, 5%, 4%, 3%, 2%, or 1%. The reappearance may involve the level of cancer cells rising above a certain threshold, e.g., above 20%, 1%, 10%, 5%, 4%, 3%, 2%, or 1%.

[0264] Ranges: throughout this disclosure, various aspects of the invention can be presented in a range format. It should be understood that the description in range format is merely for convenience and brevity and should not be construed as an inflexible limitation on the scope of the invention. Accordingly, the description of a range should be considered to have specifically disclosed all the possible subranges as well as individual numerical values within that range. For example, description of a range such as from 1 to 6 should be considered to have specifically disclosed subranges such as from 1 to 3, from 1 to 4, from 1 to 5, from 2 to 4, from 2 to 6, from 3 to 6 etc., as well as individual numbers within that range, for example, 1, 2, 2.7, 3, 4, 5, 5.3, and 6. As another example, a range such as 95-99% identity, includes something with 95%, 96%, 97%, 98% or 99% identity, and includes subranges such as 96-99%, 96-98%, 96-97%, 97-99%, 97-98% and 98-99% identity. This applies regardless of the breadth of the range.

### DESCRIPTION

[0265] Provided herein are compositions of matter and methods of use for the treatment of a disease such as cancer using cells expressing BCMA chimeric antigen receptors (CAR), e.g., CART-BCMA.

[0266] In one aspect, the invention provides a number of chimeric antigen receptors (CAR) comprising an antibody or antibody fragment engineered for enhanced binding to a BCMA protein. In one aspect, the invention provides a cell (e.g., an immune effector cell, e.g., T cell or NK cell) engineered to express a CAR, wherein the CAR T cell (“CART”) or CAR NK cell exhibits an antitumor property. In one aspect a cell is transformed with the CAR and the CAR is expressed on the cell surface. In some embodiments, the cell (e.g., an immune effector cell, e.g., T cell or NK cell) is transduced with a viral vector encoding a CAR. In some embodiments, the viral vector is a retroviral vector. In some embodiments, the viral vector is a lentiviral vector. In some such embodiments, the cell may stably express the CAR. In another embodiment, the cell (e.g., an immune effector cell, e.g., T cell or NK cell) is transfected with a nucleic acid, e.g., mRNA, cDNA, DNA, encoding a CAR. In some such embodiments, the cell may transiently express the CAR.

[0267] In one aspect, the anti-BCMA antigen binding portion of the CAR is a scFv antibody fragment. In one aspect such antibody fragments are functional in that they retain the equivalent binding affinity, e.g., they bind the same antigen with comparable efficacy, as the IgG antibody from which it is derived. In other embodiments, the antibody fragment has a lower binding affinity, e.g., it binds the same antigen with a lower binding affinity than the antibody from which it is derived, but is functional in that it provides a biological response described herein. In one embodiment, the CAR molecule comprises an antibody fragment that has a binding affinity KD of 10⁻⁴ M to 10⁻⁸ M, e.g., 10⁻⁵ M to 10⁻⁷ M, e.g., 10⁻⁶ M or 10⁻⁷ M, for the target antigen. In one embodiment, the antibody fragment has a binding affinity that is at least five-fold, 10-fold, 20-fold, 30-fold, 50-fold, 100-fold or 1,000-fold less than a reference antibody, e.g., an antibody described herein.

[0268] In one aspect such antibody fragments are functional in that they provide a biological response that can include, but is not limited to, activation of an immune response, inhibition of signal-transduction origination from its target antigen, inhibition of kinase activity, and the like, as will be understood by a skilled artisan. In one aspect, the anti-BCMA antigen binding domain of the CAR is a scFv antibody fragment that is humanized compared to the murine sequence of the scFv from which it is derived. In one embodiment, the anti-BCMA antigen binding domain is a human anti-BCMA antigen binding domain. In one embodiment, the anti-BCMA antigen binding domain is a humanized anti-BCMA antigen binding domain.

[0269] In some aspects, the antibodies of the invention are incorporated into a chimeric antigen receptor (CAR). In one aspect, the CAR comprises a BCMA binding domain comprising a sequence of SEQ ID NO: 39, SEQ ID NO: 40, SEQ ID NO: 41, SEQ ID NO: 42, SEQ ID NO: 43, SEQ ID NO: 44, SEQ ID NO: 45, SEQ ID NO: 46, SEQ ID NO: 47, SEQ ID NO: 48, SEQ ID NO: 49, SEQ ID NO: 50, SEQ ID NO: 51, SEQ ID NO: 52, SEQ ID NO: 53, SEQ ID NO:129, SEQ ID NO:130, SEQ ID NO:131, SEQ ID NO:132, SEQ ID NO:133, SEQ ID NO:134, SEQ ID NO: 135, SEQ ID NO:136, SEQ ID NO: 137, SEQ ID NO:138, SEQ ID NO: 139, SEQ ID NO: 140, SEQ ID NO: 141, SEQ ID NO: 142, SEQ ID NO: 143, SEQ ID NO: 144, SEQ ID NO: 145, SEQ ID NO: 146, SEQ ID NO: 147, SEQ ID NO: 148, SEQ ID NO: 149, SEQ ID NO: 263, SEQ ID NO: 264, SEQ ID NO: 265, or SEQ ID NO: 266. In one aspect, the scFv domains are human. In another aspect, the scFv domains are humanized variants of the scFv domain of the antibodies or antibody fragments described in PCT Publication No. WO 2012/163805, U.S. Pat. No. 7,083,785, EP Patent No. 1975231B1, or PCT Publication No. WO 13/154760 (the contents of each are hereby incorporated by reference in their entireties), which disclose antibodies or scFv fragments of murine origin that specifically binds to human BCMA. Humanization of these mouse antibodies and/or scFvs may be desired for the clinical setting, where the mouse-specific residues may induce a human-anti-mouse antigen (HAMA) response in patients who receive CART-BCMA treatment, e.g., treatment with immune effector cells, e.g., T cells or NK cells, transduced with the anti-BCMA CAR construct.

[0270] In one aspect, the anti-BCMA binding domain, e.g., human or humanized scFv, portion of a CAR of the invention is encoded by a transgene whose sequence has been codon optimized for expression in a mammalian cell. In one aspect, entire CAR construct of the invention is encoded by a transgene whose entire sequence has been codon optimized for expression in a mammalian cell. Codon optimization refers to the discovery that the frequency of occurrence of synonymous codons (i.e., codons that code for the same amino acid) in coding DNA is biased in different species. Such codon degeneracy allows an identical polypeptide to be encoded by a variety of nucleotide sequences. A variety of codon optimization methods is known in the art, and include, e.g., methods disclosed in at least U.S. Pat. Nos. 5,786,464 and 6,114,148.

[0271] In one aspect, the human anti-BCMA binding domain comprises the scFv portion provided in SEQ ID NO: 39. In one aspect, the human anti-BCMA CAR comprises the scFv portion provided in SEQ ID NO: 40. In one aspect, the human anti-BCMA binding domain comprises the scFv portion provided in SEQ ID NO: 41. In one aspect, the human anti-BCMA binding domain comprises the scFv portion provided in SEQ ID NO: 42. In one aspect, the human anti-BCMA binding domain comprises the scFv portion provided in SEQ ID NO: 43. In one aspect, the human anti-BCMA binding domain comprises the scFv portion provided in SEQ ID NO: 44. In one aspect, the human anti-BCMA binding domain comprises the scFv portion provided in SEQ ID NO: 45. In one aspect, the human anti-BCMA binding domain comprises the scFv portion provided in SEQ ID NO: 46. In one aspect, the human anti-BCMA binding domain comprises the scFv portion provided in SEQ ID NO: 47. In one aspect, the human anti-BCMA binding domain comprises the scFv portion provided in SEQ ID NO: 48. In one aspect, the human anti-BCMA binding domain comprises the scFv portion provided in SEQ ID NO: 49. In one aspect, the human anti-BCMA binding domain comprises the scFv portion provided in SEQ ID NO: 50. In one aspect, the human anti-BCMA binding domain comprises the scFv portion provided in SEQ ID NO: 51. In one aspect, the human anti-BCMA binding domain comprises the scFv portion provided in SEQ ID NO: 52. In one aspect, the human anti-BCMA binding domain comprises the scFv portion provided in SEQ ID NO: 53. In one aspect, the human anti-BCMA binding domain comprises the scFv portion provided in SEQ ID NO: 129. In one aspect, the human anti-BCMA binding domain comprises the scFv portion provided in SEQ ID NO: 130. In one aspect, the human anti-BCMA CAR comprises the scFv portion provided in SEQ ID NO: 131. In one aspect, the human anti-BCMA binding domain comprises the scFv portion provided in SEQ ID NO: 132. In one aspect, the human anti-BCMA binding domain comprises the scFv portion provided in SEQ ID NO: 133. In one aspect, the human anti-BCMA binding domain comprises the scFv portion provided in SEQ ID NO: 134. In one aspect, the human anti-BCMA binding domain comprises the scFv portion provided in SEQ ID NO: 135. In one aspect, the human anti-BCMA binding domain comprises the scFv portion provided in SEQ ID NO: 136. In one aspect, the human anti-BCMA binding domain comprises the scFv portion provided in SEQ ID NO: 137. In one aspect, the human anti-BCMA binding domain comprises the scFv portion provided in SEQ ID NO: 138. In one aspect, the human anti-BCMA binding domain comprises the scFv portion provided in SEQ ID NO: 139. In one aspect, the human anti-BCMA binding domain comprises the scFv portion provided in SEQ ID NO: 140. In one aspect, the human anti-BCMA binding domain comprises the scFv portion provided in SEQ ID NO: 141. In one aspect, the human anti-BCMA CAR comprises the scFv portion provided in SEQ ID NO: 142. In one aspect, the human anti-BCMA CAR comprises the scFv portion provided in SEQ ID NO: 143. In one aspect, the human anti-BCMA CAR comprises the scFv portion provided in SEQ ID NO: 144. In one aspect, the human anti-BCMA CAR comprises the scFv portion provided in SEQ ID NO: 145. In one aspect, the human anti-BCMA CAR comprises the scFv portion provided in SEQ ID NO: 146. In one aspect, the human anti-BCMA CAR comprises the scFv portion provided in SEQ ID NO: 147. In one aspect, the human anti-BCMA CAR comprises the scFv portion provided in SEQ ID NO: 148. In one aspect, the human anti-BCMA CAR comprises the scFv portion provided in SEQ ID NO: 149. In one aspect, the humanized anti-BCMA binding domain comprises the scFv portion provided in SEQ ID NO: 255. In one aspect, the humanized anti-BCMA CAR comprises the scFv portion provided in SEQ ID NO: 257.

[0272] In one aspect, the human anti-BCMA CAR comprises the scFv portion provided in SEQ ID NO: 263. In one aspect, the human anti-BCMA CAR comprises the scFv portion provided in SEQ ID NO: 264. In one aspect, the human anti-BCMA CAR comprises the scFv portion provided in SEQ ID NO: 265. In one aspect, the human anti-BCMA CAR comprises the scFv portion provided in SEQ ID NO: 266.

[0273] In one aspect, the CARs of the invention combine an antigen binding domain of a specific antibody with an intracellular signaling molecule. For example, in some aspects, the intracellular signaling molecule includes, but is not limited to, CD3-zeta chain, 4-1BB and CD28 signaling modules and combinations thereof. In one aspect, the antigen binding domain binds to BCMA. In one aspect, the BCMA CAR comprises a CAR selected from the sequence provided in one or more of SEQ ID NO: 99, SEQ ID NO: 100, SEQ ID NO: 101, SEQ ID NO: 102, SEQ ID NO: 103, SEQ ID NO: 104, SEQ ID NO: 105, SEQ ID NO: 106, SEQ ID NO: 107, SEQ ID NO: 108, SEQ ID NO: 109, SEQ ID NO: 110, SEQ ID NO: 111, SEQ ID NO: 112, SEQ ID NO: 113, SEQ ID NO: 213, SEQ ID NO: 214, SEQ ID NO: 215, SEQ ID NO: 216, SEQ ID NO: 217, SEQ ID NO: 218, SEQ ID NO: 219, SEQ ID NO: 220, SEQ ID NO: 221, SEQ ID NO: 222, SEQ ID NO: 223, SEQ ID NO: 224, SEQ ID NO: 225, SEQ ID NO: 226, SEQ ID NO: 227, SEQ ID NO: 228, SEQ ID NO: 229, SEQ ID NO: 230, SEQ ID NO: 231, SEQ ID NO: 232, and SEQ ID NO: 233. In one aspect, the BCMA CAR comprises the sequence provided in SEQ ID NO:99. In one aspect, the BCMA CAR comprises the sequence provided in SEQ ID NO:100. In one aspect, the BCMA CAR comprises the sequence provided in SEQ ID NO:101. In one aspect, the BCMA CAR comprises the sequence provided in SEQ ID NO:102. In one aspect, the BCMA CAR comprises the sequence provided in SEQ ID NO:103. In one aspect, the BCMA CAR comprises the sequence provided in SEQ ID NO:104. In one aspect, the BCMA CAR comprises the sequence provided in SEQ ID NO:105. In one aspect, the BCMA CAR comprises the sequence provided in SEQ ID NO:106. In one aspect, the BCMA CAR comprises the sequence provided in SEQ ID NO:107. In one aspect, the BCMA CAR comprises the sequence provided in SEQ ID NO:108. In one aspect, the BCMA CAR comprises the sequence provided in SEQ ID NO:109. In one aspect, the BCMA CAR comprises the sequence provided in SEQ ID NO:110. In one aspect, the BCMA CAR comprises the sequence provided in SEQ ID NO:111. In one aspect, the BCMA CAR comprises the sequence provided in SEQ ID NO:112. In one aspect, the BCMA CAR comprises the sequence provided in SEQ ID NO:213. In one aspect, the BCMA CAR comprises the sequence provided in SEQ ID NO:214. In one aspect, the BCMA CAR comprises the sequence provided in SEQ ID NO:215. In one aspect, the BCMA CAR comprises the sequence provided in SEQ ID NO:216. In one aspect, the BCMA CAR comprises the sequence provided in SEQ ID NO:217. In one aspect, the BCMA CAR comprises the sequence provided in SEQ ID NO:218. In one aspect, the BCMA CAR comprises the sequence provided in SEQ ID NO:219. In one aspect, the BCMA CAR comprises the sequence provided in SEQ ID NO:220. In one aspect, the BCMA CAR comprises the sequence provided in SEQ ID NO:221. In one aspect, the BCMA CAR comprises the sequence provided in SEQ ID NO:222. In one aspect, the BCMA CAR comprises the sequence provided in SEQ ID NO:223. In one aspect, the BCMA CAR comprises the sequence provided in SEQ ID NO:224. In one aspect, the BCMA CAR comprises the sequence provided in SEQ ID NO:225. In one aspect, the BCMA CAR comprises the sequence provided in SEQ ID NO:226. In one aspect, the BCMA CAR comprises the sequence provided in SEQ ID NO:227. In one aspect, the BCMA CAR comprises the sequence provided in SEQ ID NO:228. In one aspect, the BCMA CAR comprises the sequence provided in SEQ ID NO:229. In one aspect, the BCMA CAR comprises the sequence provided in SEQ ID NO:230. In one aspect, the BCMA CAR comprises the sequence provided in SEQ ID NO:231. In one aspect, the BCMA CAR comprises the sequence provided in SEQ ID NO:232. In one aspect, the BCMA CAR comprises the sequence provided in SEQ ID NO:233.

[0274] Furthermore, the present invention provides BCMA CAR compositions and their use in medicaments or methods for treating, among other diseases, cancer or any malignancy or autoimmune diseases involving cells or tissues which express BCMA

[0275] In one aspect, the CAR of the invention can be used to eradicate BCMA-expressing normal cells, thereby applicable for use as a cellular conditioning therapy prior to cell transplantation. In one aspect, the BCMA-expressing normal cell is a BCMA-expressing normal stem cell and the cell transplantation is a stem cell transplantation.

[0276] In one aspect, the invention provides a cell (e.g., T cell or NK cell) engineered to express a chimeric antigen receptor (CAR), wherein the CAR T cell (“CART”) or the CAR NK cell exhibits an antitumor property. A preferred antigen is BCMA. In one aspect, the antigen binding domain of the CAR comprises a human anti-BCMA antibody fragment or a partially humanized anti-BCMA antibody fragment. In one aspect, the antigen binding domain of the CAR comprises human anti-BCMA antibody fragment or a partially humanized anti-BCMA antibody fragment comprising an scFv. Accordingly, the invention provides a BCMA-CAR that comprises a humanized anti-BCMA binding domain and is engineered into a cell, e.g., a T cell or NK cell, and methods of their use for adoptive therapy.

[0277] In one aspect, the BCMA-CAR comprises at least one intracellular domain selected from the group of a CD137 (4-1BB) signaling domain, a CD28 signaling domain, a CD3zeta signal domain, and any combination thereof. In one aspect, the BCMA-CAR comprises at least one intracellular signaling domain is from one or more co-stimulatory molecule(s) other than a CD137 (4-1BB) or CD28.

### Chimeric Antigen Receptor (CAR)

[0278] The present invention provides a CAR (e.g., a CAR polypeptide) that comprises an anti-BCMA binding domain (e.g., human or humanized BCMA binding domain as described herein), a transmembrane domain, and an intracellular signaling domain, and wherein said anti-BCMA binding domain comprises a heavy chain complementary determining region 1 (HC CDR1), a heavy chain complementary determining region 2 (HC CDR2), and a heavy chain complementary determining region 3 (HC CDR3) of any anti-BMCA heavy chain binding domain amino acid sequences listed in Table 1 or 16. The anti-BCMA binding domain of the CAR can further comprise a light chain complementary determining region 1 (LC CDR1), a light chain complementary determining region 2 (LC CDR2), and a light chain complementary determining region 3 (LC CDR3) of any anti-BMCA heavy chain binding domain amino acid sequences listed in Table 1 or 16.

[0279] The present invention also provides nucleic acid molecules encoding the CAR as described herein, e.g., encoding a CAR that comprises an anti-BCMA binding domain (e.g., human or humanized BCMA binding domain as described herein), a transmembrane domain, and an intracellular signaling domain, and wherein said anti-BCMA binding domain comprises a heavy chain complementary determining region 1 (HC CDR1), a heavy chain complementary determining region 2 (HC CDR2), and a heavy chain complementary determining region 3 (HC CDR3) of any anti-BMCA heavy chain binding domain amino acid sequences listed in Table 1 or 16. In one embodiment, the encoded anti-BCMA binding domain of the CAR can further comprise a light chain complementary determining region 1 (LC CDR1), a light chain complementary determining region 2 (LC CDR2), and a light chain complementary determining region 3 (LC CDR3) of any anti-BMCA heavy chain binding domain amino acid sequences listed in Table 1 or 16.

[0280] In specific aspects, a CAR construct of the invention comprises a scFv domain selected from the group consisting of SEQ ID NO: 39, SEQ ID NO: 40, SEQ ID NO: 41, SEQ ID NO: 42, SEQ ID NO: 43, SEQ ID NO: 44, SEQ ID NO: 45, SEQ ID NO: 46, SEQ ID NO: 47, SEQ ID NO: 48, SEQ ID NO: 49, SEQ ID NO: 50, SEQ ID NO: 51, SEQ ID NO: 52, SEQ ID NO: 53, SEQ ID NO: 129, SEQ ID NO: 130, SEQ ID NO: 131, SEQ ID NO: 132, SEQ ID NO: 133, SEQ ID NO: 134, SEQ ID NO: 135, SEQ ID NO: 136, SEQ ID NO: 137, SEQ ID NO: 138, SEQ ID NO: 139, SEQ ID NO: 140, SEQ ID NO: 141, SEQ ID NO: 142, SEQ ID NO: 143, SEQ ID NO: 144, SEQ ID NO: 145, SEQ ID NO: 146, SEQ ID NO: 147, SEQ ID NO: 148, SEQ ID NO: 149, SEQ ID NO: 263, SEQ ID NO: 264, SEQ ID NO: 265, and SEQ ID NO: 266, wherein the scFv may be preceded by an optional leader sequence such as provided in SEQ ID NO: 1, and followed by an optional hinge sequence such as provided in SEQ ID NO:2 or SEQ ID NO:3 or SEQ ID NO:4 or SEQ ID NO:5, a transmembrane region such as provided in SEQ ID NO:6, an intracellular signalling domain that includes SEQ ID NO:7 or SEQ ID NO:8 and a CD3 zeta sequence that includes SEQ ID NO:9 or SEQ ID NO:10, wherein the domains are contiguous with and in the same reading frame to form a single fusion protein. Also included in the invention is a nucleotide sequence that encodes the polypeptide of each of the scFv fragments selected from the group consisting of SEQ ID NO: 39, SEQ ID NO: 40, SEQ ID NO: 41, SEQ ID NO: 42, SEQ ID NO: 43, SEQ ID NO: 44, SEQ ID NO: 45, SEQ ID NO: 46, SEQ ID NO: 47, SEQ ID NO: 48, SEQ ID NO: 49, SEQ ID NO: 50, SEQ ID NO: 51, SEQ ID NO: 52, SEQ ID NO: 53, SEQ ID NO: 129, SEQ ID NO: 130, SEQ ID NO: 131, SEQ ID NO: 132, SEQ ID NO: 133, SEQ ID NO: 134, SEQ ID NO: 135, SEQ ID NO: 136, SEQ ID NO: 137, SEQ ID NO: 138, SEQ ID NO: 139, SEQ ID NO: 140, SEQ ID NO: 141, SEQ ID NO: 142, SEQ ID NO: 143, SEQ ID NO: 144, SEQ ID NO: 145, SEQ ID NO: 146, SEQ ID NO: 147, SEQ ID NO: 148, SEQ ID NO: 149, SEQ ID NO: 263, SEQ ID NO: 264, SEQ ID NO: 265, and SEQ ID NO: 266.

[0281] Also included in the invention is a nucleotide sequence that encodes the polypeptide of each of the scFv fragments selected from the group consisting of SEQ ID NO: 39, SEQ ID NO: 40, SEQ ID NO: 41, SEQ ID NO: 42, SEQ ID NO: 43, SEQ ID NO: 44, SEQ ID NO: 45, SEQ ID NO: 46, SEQ ID NO: 47, SEQ ID NO: 48, SEQ ID NO: 49, SEQ ID NO: 50, SEQ ID NO: 51, SEQ ID NO: 52, SEQ ID NO: 53, SEQ ID NO: 129, SEQ ID NO: 130, SEQ ID NO: 131, SEQ ID NO: 132, SEQ ID NO: 133, SEQ ID NO: 134, SEQ ID NO: 135, SEQ ID NO: 136, SEQ ID NO: 137, SEQ ID NO: 138, SEQ ID NO: 139, SEQ ID NO: 140, SEQ ID NO: 141, SEQ ID NO: 142, SEQ ID NO: 143, SEQ ID NO: 144, SEQ ID NO: 145, SEQ ID NO: 146, SEQ ID NO: 147, SEQ ID NO: 148, SEQ ID NO: 149, SEQ ID NO: 263, SEQ ID NO: 264, SEQ ID NO: 265, and SEQ ID NO: 266, and each of the domains of SEQ ID NOS: 1,2, and 6-9, plus the encoded BCMA CAR fusion protein of the invention.

[0282] In one aspect, an exemplary BCMA CAR constructs comprise an optional leader sequence, an extracellular antigen binding domain, a hinge, a transmembrane domain, and an intracellular stimulatory domain. In one aspect an exemplary BCMA CAR construct comprises an optional leader sequence, an extracellular antigen binding domain, a hinge, a transmembrane domain, an intracellular costimulatory domain and an intracellular stimulatory domain. Specific BCMA CAR constructs containing human scFv domains of the invention are provided as SEQ ID NO: 39, SEQ ID NO: 40, SEQ ID NO: 41, SEQ ID NO: 42, SEQ ID NO: 43, SEQ ID NO: 44, SEQ ID NO: 45, SEQ ID NO: 46, SEQ ID NO: 47, SEQ ID NO: 48, SEQ ID NO: 49, SEQ ID NO: 50, SEQ ID NO: 51, SEQ ID NO: 52, SEQ ID NO: 53, SEQ ID NO: 129, SEQ ID NO: 130, SEQ ID NO: 131, SEQ ID NO: 132, SEQ ID NO: 133, SEQ ID NO: 134, SEQ ID NO: 135, SEQ ID NO: 136, SEQ ID NO: 137, SEQ ID NO: 138, SEQ ID NO: 139, SEQ ID NO: 140, SEQ ID NO: 141, SEQ ID NO: 142, SEQ ID NO: 143, SEQ ID NO: 144, SEQ ID NO: 145, SEQ ID NO: 146, SEQ ID NO: 147, SEQ ID NO: 148, and SEQ ID NO: 149. Full-length CAR sequences are also provided herein as SEQ ID NO: 39, SEQ ID NO: 40, SEQ ID NO: 41, SEQ ID NO: 42, SEQ ID NO: 43, SEQ ID NO: 44, SEQ ID NO: 45, SEQ ID NO: 46, SEQ ID NO: 47, SEQ ID NO: 48, SEQ ID NO: 49, SEQ ID NO: 50, SEQ ID NO: 51, SEQ ID NO: 52, SEQ ID NO: 53, SEQ ID NO: 129, SEQ ID NO: 130, SEQ ID NO: 131, SEQ ID NO: 132, SEQ ID NO: 133, SEQ ID NO: 134, SEQ ID NO: 135, SEQ ID NO: 136, SEQ ID NO: 137, SEQ ID NO: 138, SEQ ID NO: 139, SEQ ID NO: 140, SEQ ID NO: 141, SEQ ID NO: 142, SEQ ID NO: 143, SEQ ID NO: 144, SEQ ID NO: 145, SEQ ID NO: 146, SEQ ID NO: 147, SEQ ID NO: 148, and SEQ ID NO: 149 as shown in Table 1.

[0283] An exemplary leader sequence is provided as SEQ ID NO: 1. An exemplary hinge/spacer sequence is provided as SEQ ID NO:2 or SEQ ID NO:3 or SEQ ID NO:4 or SEQ ID NO:5. An exemplary transmembrane domain sequence is provided as SEQ ID NO:6. An exemplary sequence of the intracellular signaling domain of the 4-1BB protein is provided as SEQ ID NO: 7. An exemplary sequence of the intracellular signaling domain of CD27 is provided as SEQ ID NO:8. An exemplary CD3zeta domain sequence is provided as SEQ ID NO: 9 or SEQ ID NO:10.

[0284] In one aspect, the present invention encompasses a recombinant nucleic acid construct comprising a nucleic acid molecule encoding a CAR, wherein the nucleic acid molecule comprises the nucleic acid sequence encoding an anti-BCMA binding domain, e.g., described herein, that is contiguous with and in the same reading frame as a nucleic acid sequence encoding an intracellular signaling domain. In one aspect, the anti-BCMA binding domain is selected from one or more of SEQ ID NO: 54, SEQ ID NO: 55, SEQ ID NO: 56, SEQ ID NO: 57, SEQ ID NO: 58, SEQ ID NO: 59, SEQ ID NO: 60, SEQ ID NO: 61, SEQ ID NO: 62, SEQ ID NO: 63, SEQ ID NO: 64, SEQ ID NO: 65, SEQ ID NO: 66, SEQ ID NO: 67, SEQ ID NO: 68, SEQ ID NO: 150, SEQ ID NO: 151, SEQ ID NO: 152, SEQ ID NO: 153, SEQ ID NO: 154, SEQ ID NO: 155, SEQ ID NO: 156, SEQ ID NO: 157, SEQ ID NO: 158, SEQ ID NO: 159, SEQ ID NO: 160, SEQ ID NO: 161, SEQ ID NO: 162, SEQ ID NO: 163, SEQ ID NO: 164, SEQ ID NO: 165, SEQ ID NO: 166, SEQ ID NO: 167, SEQ ID NO: 168, SEQ ID NO: 169, and SEQ ID NO: 170. In one aspect, the anti-BCMA binding domain comprises SEQ ID NO: 54. In one aspect, the anti-BCMA binding domain comprises SEQ ID NO: 55. In one aspect, the anti-BCMA binding domain comprises SEQ ID NO: 56. In one aspect, the anti-BCMA binding domain comprises SEQ ID NO: 57. In one aspect, the anti-BCMA binding domain comprises SEQ ID NO: 58. In one aspect, the anti-BCMA binding domain comprises SEQ ID NO: 59. In one aspect, the anti-BCMA binding domain comprises SEQ ID NO: 60. In one aspect, the anti-BCMA binding domain comprises SEQ ID NO: 61. In one aspect, the anti-BCMA binding domain comprises SEQ ID NO: 62. In one aspect, the anti-BCMA binding domain comprises SEQ ID NO: 63. In one aspect, the anti-BCMA binding domain comprises SEQ ID NO: 64. In one aspect, the anti-BCMA binding domain comprises SEQ ID NO: 65. In one aspect, the anti-BCMA binding domain comprises SEQ ID NO: 66. In one aspect, the anti-BCMA binding domain comprises SEQ ID NO: 67. In one aspect, the anti-BCMA binding domain comprises SEQ ID NO: 68. In one aspect, the anti-BCMA binding domain comprises SEQ ID NO: 150. In one aspect, the anti-BCMA binding domain comprises SEQ ID NO: 151. In one aspect, the anti-BCMA binding domain comprises SEQ ID NO: 152. In one aspect, the anti-BCMA binding domain comprises SEQ ID NO: 153. In one aspect, the anti-BCMA binding domain comprises SEQ ID NO: 154. In one aspect, the anti-BCMA binding domain comprises SEQ ID NO: 155. In one aspect, the anti-BCMA binding domain comprises SEQ ID NO: 156. In one aspect, the anti-BCMA binding domain comprises SEQ ID NO: 157. In one aspect, the anti-BCMA binding domain comprises SEQ ID NO: 158. In one aspect, the anti-BCMA binding domain comprises SEQ ID NO: 159. In one aspect, the anti-BCMA binding domain comprises SEQ ID NO: 160. In one aspect, the anti-BCMA binding domain comprises SEQ ID NO: 161. In one aspect, the anti-BCMA binding domain comprises SEQ ID NO: 162. In one aspect, the anti-BCMA binding domain comprises SEQ ID NO: 163. In one aspect, the anti-BCMA binding domain comprises SEQ ID NO: 164. In one aspect, the anti-BCMA binding domain comprises SEQ ID NO: 165. In one aspect, the anti-BCMA binding domain comprises SEQ ID NO: 166. In one aspect, the anti-BCMA binding domain comprises SEQ ID NO: 167. In one aspect, the anti-BCMA binding domain comprises SEQ ID NO: 168. In one aspect, the anti-BCMA binding domain comprises SEQ ID NO: 169. In one aspect, the anti-BCMA binding domain comprises SEQ ID NO: 170.

[0285] In one aspect, the present invention encompasses a recombinant nucleic acid construct comprising a nucleic acid molecule encoding a CAR, wherein the nucleic acid molecule comprises a nucleic acid sequence encoding an anti-BCMA binding domain selected from one or more of SEQ ID NO: 54, SEQ ID NO: 55, SEQ ID NO: 56, SEQ ID NO: 57, SEQ ID NO: 58, SEQ ID NO: 59, SEQ ID NO: 60, SEQ ID NO: 61, SEQ ID NO: 62, SEQ ID NO: 63, SEQ ID NO: 64, SEQ ID NO: 65, SEQ ID NO: 66, SEQ ID NO: 67, SEQ ID NO: 68, SEQ ID NO: 150, SEQ ID NO: 151, SEQ ID NO: 152, SEQ ID NO: 153, SEQ ID NO: 154, SEQ ID NO: 155, SEQ ID NO: 156, SEQ ID NO: 157, SEQ ID NO: 158, SEQ ID NO: 159, SEQ ID NO: 160, SEQ ID NO: 161, SEQ ID NO: 162, SEQ ID NO: 163, SEQ ID NO: 164, SEQ ID NO: 165, SEQ ID NO: 166, SEQ ID NO: 167, SEQ ID NO: 168, SEQ ID NO: 169, and SEQ ID NO: 170, e.g., wherein the sequence is contiguous with and in the same reading frame as the nucleic acid sequence encoding an intracellular signaling domain. An exemplary intracellular signaling domain that can be used in the CAR includes, but is not limited to, one or more intracellular signaling domains of, e.g., CD3-zeta, CD28, 4-1BB, and the like. In some instances, the CAR can comprise any combination of CD3-zeta, CD28, 4-1BB, and the like. In one aspect the nucleic acid sequence of a CAR construct of the invention is selected from one or more of SEQ ID NO: 114, SEQ ID NO: 115, SEQ ID NO: 116, SEQ ID NO: 117, SEQ ID NO: 118, SEQ ID NO: 119, SEQ ID NO: 120, SEQ ID NO: 121, SEQ ID NO: 122, SEQ ID NO: 123, SEQ ID NO: 124, SEQ ID NO: 125, SEQ ID NO: 126, SEQ ID NO: 127, SEQ ID NO: 128, SEQ ID NO: 234, SEQ ID NO: 235, SEQ ID NO: 236, SEQ ID NO: 237, SEQ ID NO: 238, SEQ ID NO: 239, SEQ ID NO: 240, SEQ ID NO: 241, SEQ ID NO: 242, SEQ ID NO: 243, SEQ ID NO: 244, SEQ ID NO: 245, SEQ ID NO: 246, SEQ ID NO: 247, SEQ ID NO: 248, SEQ ID NO: 249, SEQ ID NO: 250, SEQ ID NO: 251, SEQ ID NO: 252, SEQ ID NO: 253, or SEQ ID NO: 254. In one aspect the nucleic acid sequence of a CAR construct is SEQ ID NO: 114. In one aspect the nucleic acid sequence of a CAR construct is SEQ ID NO: 115. In one aspect the nucleic acid sequence of a CAR construct is SEQ ID NO: 116. In one aspect the nucleic acid sequence of a CAR construct is SEQ ID NO: 117. In one aspect the nucleic acid sequence of a CAR construct is SEQ ID NO: 118. In one aspect the nucleic acid sequence of a CAR construct is SEQ ID NO: 119. In one aspect the nucleic acid sequence of a CAR construct is SEQ ID NO: 120. In one aspect the nucleic acid sequence of a CAR construct is SEQ ID NO: 121. In one aspect the nucleic acid sequence of a CAR construct is SEQ ID NO: 122. In one aspect the nucleic acid sequence of a CAR construct is SEQ ID NO: 123. In one aspect the nucleic acid sequence of a CAR construct is SEQ ID NO: 124. In one aspect the nucleic acid sequence of a CAR construct is SEQ ID NO: 125. In one aspect the nucleic acid sequence of a CAR construct is SEQ ID NO: 126. In one aspect the nucleic acid sequence of a CAR construct is SEQ ID NO: 127. In one aspect the nucleic acid sequence of a CAR construct is SEQ ID NO: 128. In one aspect the nucleic acid sequence of a CAR construct is SEQ ID NO: 234. In one aspect the nucleic acid sequence of a CAR construct is SEQ ID NO: 235. In one aspect the nucleic acid sequence of a CAR construct is SEQ ID NO: 236. In one aspect the nucleic acid sequence of a CAR construct is SEQ ID NO: 237. In one aspect the nucleic acid sequence of a CAR construct is SEQ ID NO: 238. In one aspect the nucleic acid sequence of a CAR construct is SEQ ID NO: 239. In one aspect the nucleic acid sequence of a CAR construct is SEQ ID NO: 240. In one aspect the nucleic acid sequence of a CAR construct is SEQ ID NO: 241. In one aspect the nucleic acid sequence of a CAR construct is SEQ ID NO: 242. In one aspect the nucleic acid sequence of a CAR construct is SEQ ID NO: 243. In one aspect the nucleic acid sequence of a CAR construct is SEQ ID NO: 244. In one aspect the nucleic acid sequence of a CAR construct is SEQ ID NO: 245. In one aspect the nucleic acid sequence of a CAR construct is SEQ ID NO: 246. In one aspect the nucleic acid sequence of a CAR construct is SEQ ID NO: 247. In one aspect the nucleic acid sequence of a CAR construct is SEQ ID NO: 248. In one aspect the nucleic acid sequence of a CAR construct is SEQ ID NO: 249. In one aspect the nucleic acid sequence of a CAR construct is SEQ ID NO: 250. In one aspect the nucleic acid sequence of a CAR construct is SEQ ID NO: 251. In one aspect the nucleic acid sequence of a CAR construct is SEQ ID NO: 252. In one aspect the nucleic acid sequence of a CAR construct is SEQ ID NO: 253. In one aspect the nucleic acid sequence of a CAR construct is SEQ ID NO: 254.

[0286] The nucleic acid sequences coding for the desired molecules can be obtained using recombinant methods known in the art, such as, for example by screening libraries from cells expressing the gene, by deriving the gene from a vector known to include the same, or by isolating directly from cells and tissues containing the same, using standard techniques. Alternatively, the nucleic acid of interest can be produced synthetically, rather than cloned.

[0287] The present invention includes retroviral and lentiviral vector constructs expressing a CAR that can be directly transduced into a cell.

[0288] The present invention also includes an RNA construct that can be directly transfected into a cell. A method for generating mRNA for use in transfection involves in vitro transcription (IVT) of a template with specially designed primers, followed by polyA addition, to produce a construct containing 3′ and 5′ untranslated sequence (“UTR”), a 5′ cap and/or Internal Ribosome Entry Site (IRES), the nucleic acid to be expressed, and a polyA tail, typically 50-2000 bases in length (SEQ ID NO:35). RNA so produced can efficiently transfect different kinds of cells. In one embodiment, the template includes sequences for the CAR. In an embodiment, an RNA CAR vector is transduced into a cell, e.g., T cell or NK cell, by electroporation.

### Antigen Binding Domain

[0289] The CARs of the present invention comprise a target-specific binding domain. The choice of moiety depends upon the type and number of ligands that define the surface of a target cell. For example, the antigen binding domain may be chosen to recognize an antigen that acts as a cell surface marker on target cells associated with a particular disease state.

[0290] In one aspect, the CAR-mediated T-cell response can be directed to an antigen of interest by way of engineering an antigen binding domain that specifically binds a desired antigen into the CAR.

[0291] In one aspect, the CAR of the present invention comprises a binding domain that specifically binds BCMA. In one aspect, the CAR of the present invention comprises an antigen binding domain that specifically binds human BCMA.

[0292] The antigen binding domain can be any protein that binds to the antigen including but not limited to a monoclonal antibody, a polyclonal antibody, a recombinant antibody, a human antibody, a humanized antibody, and a functional fragment thereof, including but not limited to a single-domain antibody such as a heavy chain variable domain (VH), a light chain variable domain (VL) and a variable domain (VHH) of camelid derived nanobody, and to an alternative scaffold known in the art to function as antigen binding domain, such as a recombinant fibronectin domain, and the like. In some instances, it is beneficial for the antigen binding domain to be derived from the same species in which the CAR will ultimately be used in. For example, for use in humans, it may be beneficial for the antigen binding domain of the CAR to comprise human or humanized residues for the antigen binding domain of an antibody or antibody fragment.

[0293] Thus, in one aspect, the antigen binding domain comprises a human or a humanized antibody or an antibody fragment. In one embodiment, the human anti-BCMA binding domain comprises one or more (e.g., all three) light chain complementary determining region 1 (LC CDR1), light chain complementary determining region 2 (LC CDR2), and light chain complementary determining region 3 (LC CDR3) of a human anti-BCMA binding domain described herein, and/or one or more (e.g., all three) heavy chain complementary determining region 1 (HC CDR1), heavy chain complementary determining region 2 (HC CDR2), and heavy chain complementary determining region 3 (HC CDR3) of a human anti-BCMA binding domain described herein, e.g., a human anti-BCMA binding domain comprising one or more, e.g., all three, LC CDRs and one or more, e.g., all three, HC CDRs. In one embodiment, the human anti-BCMA binding domain comprises one or more (e.g., all three) heavy chain complementary determining region 1 (HC CDR1), heavy chain complementary determining region 2 (HC CDR2), and heavy chain complementary determining region 3 (HC CDR3) of a human anti-BCMA binding domain described herein, e.g., the human anti-BCMA binding domain has two variable heavy chain regions, each comprising a HC CDR1, a HC CDR2 and a HC CDR3 described herein. In one embodiment, the human anti-BCMA binding domain comprises a human light chain variable region described herein (e.g., in Table 1) and/or a human heavy chain variable region described herein (e.g., in Table 1). In one embodiment, the human anti-BCMA binding domain comprises a human heavy chain variable region described herein (e.g., in Table 1), e.g., at least two human heavy chain variable regions described herein (e.g., in Table 1). In one embodiment, the anti-BCMA binding domain is a scFv comprising a light chain and a heavy chain of an amino acid sequence of Table 1. In an embodiment, the anti-BCMA binding domain (e.g., an scFv) comprises: a light chain variable region comprising an amino acid sequence having at least one, two or three modifications (e.g., substitutions, e.g., conservative substitutions) but not more than 30, 20 or 10 modifications (e.g., substitutions, e.g., conservative substitutions) of an amino acid sequence of a light chain variable region provided in Table 1, or a sequence with 95-99% identity with an amino acid sequence of Table 11; and/or a heavy chain variable region comprising an amino acid sequence having at least one, two or three modifications (e.g., substitutions, e.g., conservative substitutions) but not more than 30, 20 or 10 modifications (e.g., substitutions, e.g., conservative substitutions) of an amino acid sequence of a heavy chain variable region provided in Table 1, or a sequence with 95-99% identity to an amino acid sequence of Table 1.

[0294] In one embodiment, the human anti-BCMA binding domain comprises a sequence selected from a group consisting of SEQ ID NO: 39, SEQ ID NO: 40, SEQ ID NO: 41, SEQ ID NO: 42, SEQ ID NO: 43, SEQ ID NO: 44, SEQ ID NO: 45, SEQ ID NO: 46, SEQ ID NO: 47, SEQ ID NO: 48, SEQ ID NO: 49, SEQ ID NO: 50, SEQ ID NO: 51, SEQ ID NO: 52, SEQ ID NO: 53, SEQ ID NO: 129, SEQ ID NO: 130, SEQ ID NO: 131, SEQ ID NO: 132, SEQ ID NO: 133, SEQ ID NO: 134, SEQ ID NO: 135, SEQ ID NO: 136, SEQ ID NO: 137, SEQ ID NO: 138, SEQ ID NO: 139, SEQ ID NO: 140, SEQ ID NO: 141, SEQ ID NO: 142, SEQ ID NO: 143, SEQ ID NO: 144, SEQ ID NO: 145, SEQ ID NO: 146, SEQ ID NO: 147, SEQ ID NO: 148, and SEQ ID NO: 149, or a sequence with 95-99% identify thereof. In one embodiment, the nucleic acid sequence encoding the human anti-BCMA binding domain comprises a sequence selected from a group consisting of SEQ ID NO: 54, SEQ ID NO: 55, SEQ ID NO: 56, SEQ ID NO: 57, SEQ ID NO: 58, SEQ ID NO: 59, SEQ ID NO: 60, SEQ ID NO: 61, SEQ ID NO: 62, SEQ ID NO: 63, SEQ ID NO: 64, SEQ ID NO: 65, SEQ ID NO: 66, SEQ ID NO: 67, SEQ ID NO: 68, SEQ ID NO: 150, SEQ ID NO: 151, SEQ ID NO: 152, SEQ ID NO: 153, SEQ ID NO: 154, SEQ ID NO: 155, SEQ ID NO: 156, SEQ ID NO: 157, SEQ ID NO: 158, SEQ ID NO: 159, SEQ ID NO: 160, SEQ ID NO: 161, SEQ ID NO: 162, SEQ ID NO: 163, SEQ ID NO: 164, SEQ ID NO: 165, SEQ ID NO: 166, SEQ ID NO: 167, SEQ ID NO: 168, SEQ ID NO: 169, and SEQ ID NO: 170, or a sequence with 95-99% identify thereof. In one embodiment, the human anti-BCMA binding domain is a scFv, and a light chain variable region comprising an amino acid sequence described herein, e.g., in Table 1, is attached to a heavy chain variable region comprising an amino acid sequence described herein, e.g., in Table 1, via a linker, e.g., a linker described herein. In one embodiment, the human anti-BCMA binding domain includes a (Gly₄-Ser)n linker, wherein n is 1, 2, 3, 4, 5, or 6, preferably 3 or 4 (SEQ ID NO:26). The light chain variable region and heavy chain variable region of a scFv can be, e.g., in any of the following orientations: light chain variable region-linker-heavy chain variable region or heavy chain variable region-linker-light chain variable region. In one aspect, the antigen binding domain portion comprises one or more sequence selected from SEQ ID NO: 39, SEQ ID NO: 40, SEQ ID NO: 41, SEQ ID NO: 42, SEQ ID NO: 43, SEQ ID NO: 44, SEQ ID NO: 45, SEQ ID NO: 46, SEQ ID NO: 47, SEQ ID NO: 48, SEQ ID NO: 49, SEQ ID NO: 50, SEQ ID NO: 51, SEQ ID NO: 52, SEQ ID NO: 53, SEQ ID NO: 129, SEQ ID NO: 130, SEQ ID NO: 131, SEQ ID NO: 132, SEQ ID NO: 133, SEQ ID NO: 134, SEQ ID NO: 135, SEQ ID NO: 136, SEQ ID NO: 137, SEQ ID NO: 138, SEQ ID NO: 139, SEQ ID NO: 140, SEQ ID NO: 141, SEQ ID NO: 142, SEQ ID NO: 143, SEQ ID NO: 144, SEQ ID NO: 145, SEQ ID NO: 146, SEQ ID NO: 147, SEQ ID NO: 148, and SEQ ID NO: 149. In one aspect the CAR is selected from one or more sequence selected from SEQ ID NO: 99, SEQ ID NO: 100, SEQ ID NO: 101, SEQ ID NO: 102, SEQ ID NO: 103, SEQ ID NO: 104, SEQ ID NO: 105, SEQ ID NO: 106, SEQ ID NO: 107, SEQ ID NO: 108, SEQ ID NO: 109, SEQ ID NO: 110, SEQ ID NO: 111, SEQ ID NO: 112, SEQ ID NO: 113, SEQ ID NO: 213, SEQ ID NO: 214, SEQ ID NO: 215, SEQ ID NO: 216, SEQ ID NO: 217, SEQ ID NO: 218, SEQ ID NO: 219, SEQ ID NO: 220, SEQ ID NO: 221, SEQ ID NO: 222, SEQ ID NO: 223, SEQ ID NO: 224, SEQ ID NO: 225, SEQ ID NO: 226, SEQ ID NO: 227, SEQ ID NO: 228, SEQ ID NO: 229, SEQ ID NO: 230, SEQ ID NO: 231, SEQ ID NO: 232, and SEQ ID NO: 233.

[0295] In one embodiment, the anti-BCMA binding domain comprises a light chain variable region described herein (e.g., in Table 16) and/or a heavy chain variable region described herein (e.g., in Table 16). In one embodiment, the encoded humanized anti-BCMA binding domain comprises a light chain variable region provided in SEQ ID NO: 259, SEQ ID NO: 260, SEQ ID NO: 261, SEQ ID NO: 262, and/or a heavy chain variable region provided in SEQ ID NO: 255, SEQ ID NO: 256, SEQ ID NO: 257, SEQ ID NO: 258. In one embodiment, the encoded anti-BCMA binding domain is a scFv comprising a light chain and a heavy chain of an amino acid sequence of Table 16. In an embodiment, the human or humanized anti-BCMA binding domain (e.g., an scFv) comprises: a light chain variable region comprising an amino acid sequence having at least one, two or three modifications (e.g., substitutions, e.g., conservative substitutions) but not more than 30, 20 or 10 modifications (e.g., substitutions, e.g., conservative substitutions) of an amino acid sequence of a light chain variable region provided in SEQ ID NO: 259, SEQ ID NO: 260, SEQ ID NO: 261, SEQ ID NO: 262, or a sequence with 95-99% identity thereof; and/or a heavy chain variable region comprising an amino acid sequence having at least one, two or three modifications (e.g., substitutions, e.g., conservative substitutions) but not more than 30, 20 or 10 modifications (e.g., substitutions, e.g., conservative substitutions) of an amino acid sequence of a heavy chain variable region provided in SEQ ID NO: 255, SEQ ID NO: 256, SEQ ID NO: 257, SEQ ID NO: 258, or a sequence with 95-99% identity thereof. In one embodiment, the encoded anti-BCMA binding domain includes a (Gly4-Ser)n linker, wherein n is 1, 2, 3, 4, 5, or 6, preferably 3 or 4 (SEQ ID NO:26). The light chain variable region and heavy chain variable region of a scFv can be, e.g., in any of the following orientations: light chain variable region-linker-heavy chain variable region or heavy chain variable region-linker-light chain variable region.

[0296] In one embodiment, the human anti-BCMA binding domain comprises a sequence selected from a group consisting of SEQ ID NO: 263, SEQ ID NO: 264, SEQ ID NO: 265, and SEQ ID NO: 266, or a sequence with 95-99% identity thereof.

[0297] In some aspects, a non-human antibody is humanized, where specific sequences or regions of the antibody are modified to increase similarity to an antibody naturally produced in a human or fragment thereof. In one aspect, the antigen binding domain is humanized.

[0298] A humanized antibody can be produced using a variety of techniques known in the art, including but not limited to, CDR-grafting (see, e.g., European Patent No. EP 239,400; International Publication No. WO 91/09967; and U.S. Pat. Nos. 5,225,539, 5,530,101, and 5,585,089, each of which is incorporated herein in its entirety by reference), veneering or resurfacing (see, e.g., European Patent Nos. EP 592,106 and EP 519,596; Padlan, 1991, Molecular Immunology, 28(4/5):489-498; Studnicka et al., 1994, Protein Engineering, 7(6):805-814; and Roguska et al., 1994, PNAS, 91:969-973, each of which is incorporated herein by its entirety by reference), chain shuffling (see, e.g., U.S. Pat. No. 5,565,332, which is incorporated herein in its entirety by reference), and techniques disclosed in, e.g., U.S. Patent Application Publication No. US2005/0042664, U.S. Patent Application Publication No. US2005/0048617, U.S. Pat. No. 6,407,213, U.S. Pat. No. 5,766,886, International Publication No. WO 9317105, Tan et al., J. Immunol., 169:1119-25 (2002), Caldas et al., Protein Eng., 13(5):353-60 (2000), Morea et al., Methods, 20(3):267-79 (2000), Baca et al., J. Biol. Chem., 272(16):10678-84 (1997), Roguska et al., Protein Eng., 9(10):895-904 (1996), Couto et al., Cancer Res., 55 (23 Supp):5973s-5977s (1995), Couto et al., Cancer Res., 55(8):1717-22 (1995), Sandhu J S, Gene, 150(2):409-10 (1994), and Pedersen et al., J. Mol. Biol., 235(3):959-73 (1994), each of which is incorporated herein in its entirety by reference. Often, framework residues in the framework regions will be substituted with the corresponding residue from the CDR donor antibody to alter, for example improve, antigen binding. These framework substitutions, e.g., conservative substitutions are identified by methods well-known in the art, e.g., by modeling of the interactions of the CDR and framework residues to identify framework residues important for antigen binding and sequence comparison to identify unusual framework residues at particular positions. (See, e.g., Queen et al., U.S. Pat. No. 5,585,089; and Riechmann et al., 1988, Nature, 332:323, which are incorporated herein by reference in their entireties.)

[0299] A humanized antibody or antibody fragment has one or more amino acid residues remaining in it from a source which is nonhuman. These nonhuman amino acid residues are often referred to as “import” residues, which are typically taken from an “import” variable domain. As provided herein, humanized antibodies or antibody fragments comprise one or more CDRs from nonhuman immunoglobulin molecules and framework regions wherein the amino acid residues comprising the framework are derived completely or mostly from human germline. Multiple techniques for humanization of antibodies or antibody fragments are well-known in the art and can essentially be performed following the method of Winter and co-workers (Jones et al., Nature, 321:522-525 (1986); Riechmann et al., Nature, 332:323-327 (1988); Verhoeyen et al., Science, 239:1534-1536 (1988)), by substituting rodent CDRs or CDR sequences for the corresponding sequences of a human antibody, i.e., CDR-grafting (EP 239,400; PCT Publication No. WO 91/09967; and U.S. Pat. Nos. 4,816,567; 6,331,415; 5,225,539; 5,530,101; 5,585,089; 6,548,640, the contents of which are incorporated herein by reference herein in their entirety). In such humanized antibodies and antibody fragments, substantially less than an intact human variable domain has been substituted by the corresponding sequence from a nonhuman species. Humanized antibodies are often human antibodies in which some CDR residues and possibly some framework (FR) residues are substituted by residues from analogous sites in rodent antibodies. Humanization of antibodies and antibody fragments can also be achieved by veneering or resurfacing (EP 592,106; EP 519,596; Padlan, 1991, Molecular Immunology, 28(4/5):489-498; Studnicka et al., Protein Engineering, 7(6):805-814 (1994); and Roguska et al., PNAS, 91:969-973 (1994)) or chain shuffling (U.S. Pat. No. 5,565,332), the contents of which are incorporated herein by reference herein in their entirety.

[0300] The choice of human variable domains, both light and heavy, to be used in making the humanized antibodies is to reduce antigenicity. According to the so-called “best-fit” method, the sequence of the variable domain of a rodent antibody is screened against the entire library of known human variable-domain sequences. The human sequence which is closest to that of the rodent is then accepted as the human framework (FR) for the humanized antibody (Sims et al., J. Immunol., 151:2296 (1993); Chothia et al., J. Mol. Biol., 196:901 (1987), the contents of which are incorporated herein by reference herein in their entirety). Another method uses a particular framework derived from the consensus sequence of all human antibodies of a particular subgroup of light or heavy chains. The same framework may be used for several different humanized antibodies (see, e.g., Nicholson et al. Mol. Immun. 34 (16-17): 1157-1165 (1997); Carter et al., Proc. Natl. Acad. Sci. USA, 89:4285 (1992); Presta et al., J. Immunol., 151:2623 (1993), the contents of which are incorporated herein by reference herein in their entirety). In some embodiments, the framework region, e.g., all four framework regions, of the heavy chain variable region are derived from a VH4_{—}4-59 germline sequence. In one embodiment, the framework region can comprise, one, two, three, four or five modifications, e.g., substitutions, e.g., conservative substitutions, e.g., from the amino acid at the corresponding murine sequence. In one embodiment, the framework region, e.g., all four framework regions of the light chain variable region are derived from a VK3_{—}1.25 germline sequence. In one embodiment, the framework region can comprise, one, two, three, four or five modifications, e.g., substitutions, e.g., conservative substitutions, e.g., from the amino acid at the corresponding murine sequence.

[0301] In some aspects, the portion of a CAR composition of the invention that comprises an antibody fragment is humanized with retention of high affinity for the target antigen and other favorable biological properties. According to one aspect of the invention, humanized antibodies and antibody fragments are prepared by a process of analysis of the parental sequences and various conceptual humanized products using three-dimensional models of the parental and humanized sequences. Three-dimensional immunoglobulin models are commonly available and are familiar to those skilled in the art. Computer programs are available which illustrate and display probable three-dimensional conformational structures of selected candidate immunoglobulin sequences. Inspection of these displays permits analysis of the likely role of the residues in the functioning of the candidate immunoglobulin sequence, e.g., the analysis of residues that influence the ability of the candidate immunoglobulin to bind the target antigen. In this way, FR residues can be selected and combined from the recipient and import sequences so that the desired antibody or antibody fragment characteristic, such as increased affinity for the target antigen, is achieved. In general, the CDR residues are directly and most substantially involved in influencing antigen binding.

[0302] A humanized antibody or antibody fragment may retain a similar antigenic specificity as the original antibody, e.g., in the present invention, the ability to bind human BCMA In some embodiments, a humanized antibody or antibody fragment may have improved affinity and/or specificity of binding to human BCMA.

[0303] In one embodiment, the humanized anti-BCMA binding domain of the CAR, comprises one or more (e.g., all three) light chain complementary determining region 1 (LC CDR1), light chain complementary determining region 2 (LC CDR2), and light chain complementary determining region 3 (LC CDR3) of a humanized anti-BCMA binding domain described herein, and/or one or more (e.g., all three) heavy chain complementary determining region 1 (HC CDR1), heavy chain complementary determining region 2 (HC CDR2), and heavy chain complementary determining region 3 (HC CDR3) of a humanized anti-BCMA binding domain described herein, e.g., a humanized anti-BCMA binding domain comprising one or more, e.g., all three, LC CDRs and one or more, e.g., all three, HC CDRs. In one embodiment, the humanized anti-BCMA binding domain comprises one or more (e.g., all three) heavy chain complementary determining region 1 (HC CDR1), heavy chain complementary determining region 2 (HC CDR2), and heavy chain complementary determining region 3 (HC CDR3) of a humanized anti-BCMA binding domain described herein, e.g., the humanized anti-BCMA binding domain has two variable heavy chain regions, each comprising a HC CDR1, a HC CDR2 and a HC CDR3 described herein. In one embodiment, the humanized anti-BCMA binding domain comprises a humanized light chain variable region described herein (e.g., SEQ ID NO:255 or 257) and/or a human heavy chain variable region described herein (e.g., SEQ ID NO:255 or 257).

[0304] In one aspect, the anti-BCMA binding domain is characterized by particular functional features or properties of an antibody or antibody fragment. For example, in one aspect, the portion of a CAR composition of the invention that comprises an antigen binding domain specifically binds human BCMA

[0305] In one aspect, the antigen binding domain has the same or a similar binding specificity to human BCMA as mouse BCMA. In one aspect, the invention relates to an antigen binding domain comprising an antibody or antibody fragment, wherein the antibody binding domain specifically binds to a BCMA protein or fragment thereof, wherein the antibody or antibody fragment comprises a variable light chain and/or a variable heavy chain that includes an amino acid sequence of SEQ ID NO: 39, SEQ ID NO: 40, SEQ ID NO: 41, SEQ ID NO: 42, SEQ ID NO: 43, SEQ ID NO: 44, SEQ ID NO: 45, SEQ ID NO: 46, SEQ ID NO: 47, SEQ ID NO: 48, SEQ ID NO: 49, SEQ ID NO: 50, SEQ ID NO: 51, SEQ ID NO: 52, SEQ ID NO: 53, SEQ ID NO: 129, SEQ ID NO: 130, SEQ ID NO: 131, SEQ ID NO: 132, SEQ ID NO: 133, SEQ ID NO: 134, SEQ ID NO: 135, SEQ ID NO: 136, SEQ ID NO: 137, SEQ ID NO: 138, SEQ ID NO: 139, SEQ ID NO: 140, SEQ ID NO: 141, SEQ ID NO: 142, SEQ ID NO: 143, SEQ ID NO: 144, SEQ ID NO: 145, SEQ ID NO: 146, SEQ ID NO: 147, SEQ ID NO: 148, or SEQ ID NO: 149. In one aspect, the antigen binding domain comprises an amino acid sequence of an scFv selected from SEQ ID NO: 39, SEQ ID NO: 40, SEQ ID NO: 41, SEQ ID NO: 42, SEQ ID NO: 43, SEQ ID NO: 44, SEQ ID NO: 45, SEQ ID NO: 46, SEQ ID NO: 47, SEQ ID NO: 48, SEQ ID NO: 49, SEQ ID NO: 50, SEQ ID NO: 51, SEQ ID NO: 52, SEQ ID NO: 53, SEQ ID NO: 129, SEQ ID NO: 130, SEQ ID NO: 131, SEQ ID NO: 132, SEQ ID NO: 133, SEQ ID NO: 134, SEQ ID NO: 135, SEQ ID NO: 136, SEQ ID NO: 137, SEQ ID NO: 138, SEQ ID NO: 139, SEQ ID NO: 140, SEQ ID NO: 141, SEQ ID NO: 142, SEQ ID NO: 143, SEQ ID NO: 144, SEQ ID NO: 145, SEQ ID NO: 146, SEQ ID NO: 147, SEQ ID NO: 148, or SEQ ID NO: 149. In certain aspects, the scFv is contiguous with and in the same reading frame as a leader sequence. In one aspect the leader sequence is the polypeptide sequence provided as SEQ ID NO:1.

[0306] In one aspect, the anti-BCMA binding domain is a fragment, e.g., a single chain variable fragment (scFv). In one aspect, the anti-BCMA binding domain is a Fv, a Fab, a (Fab′)2, or a bi-functional (e.g. bi-specific) hybrid antibody (e.g., Lanzavecchia et al., Eur. J. Immunol. 17, 105 (1987)). In one aspect, the antibodies and fragments thereof of the invention binds a BCMA protein with wild-type or enhanced affinity.

[0307] In some instances, scFvs can be prepared according to method known in the art (see, for example, Bird et al., (1988) Science 242:423-426 and Huston et al., (1988) Proc. Natl. Acad. Sci. USA 85:5879-5883). ScFv molecules can be produced by linking VH and VL regions together using flexible polypeptide linkers. The scFv molecules comprise a linker (e.g., a Ser-Gly linker) with an optimized length and/or amino acid composition. The linker length can greatly affect how the variable regions of a scFv fold and interact. In fact, if a short polypeptide linker is employed (e.g., between 5-10 amino acids) intrachain folding is prevented. Interchain folding is also required to bring the two variable regions together to form a functional epitope binding site. For examples of linker orientation and size see, e.g., Hollinger et al. 1993 Proc Natl Acad. Sci. U.S.A. 90:6444-6448, U.S. Patent Application Publication Nos. 2005/0100543, 2005/0175606, 2007/0014794, and PCT publication Nos. WO2006/020258 and WO2007/024715, is incorporated herein by reference.

[0308] An scFv can comprise a linker of at least 1, 2, 3, 4, 5, 6, 7, 8, 9, 10, 11, 12, 13, 14, 15, 16, 17, 18, 19, 20, 25, 30, 35, 40, 45, 50, or more amino acid residues between its VL and VH regions. The linker sequence may comprise any naturally occurring amino acid. In some embodiments, the linker sequence comprises amino acids glycine and serine. In another embodiment, the linker sequence comprises sets of glycine and serine repeats such as (Gly₄Ser)n, where n is a positive integer equal to or greater than 1 (SEQ ID NO:25). In one embodiment, the linker can be (Gly₄Ser)₄ (SEQ ID NO:27) or (Gly₄Ser)₃(SEQ ID NO:28). Variation in the linker length may retain or enhance activity, giving rise to superior efficacy in activity studies.

[0309] Exemplary Human BCMA CAR Constructs and Antigen Binding Domains

[0310] Exemplary BCMA CAR constructs disclose herein comprise an scFv (e.g., a scFv as disclosed in Tables 1 or 16, optionally preceded with an optional leader sequence (e.g., SEQ ID NO:1 and SEQ ID NO:12 for exemplary leader amino acid and nucleotide sequences, respectively). The sequences of the scFv fragments (SEQ ID NOs: 39-53, 129-149, or 263-266, not including the optional leader sequence) are provided herein in Tables 1 or 16. The BCMA CAR construct can further include an optional hinge domain, e.g., a CD8 hinge domain (e.g., including the amino acid sequence of SEQ ID NO: 2 or encoded by a nucleic acid sequence of SEQ ID NO:13); a transmembrane domain, e.g., a CD8 transmembrane domain (e.g., including the amino acid sequence of SEQ ID NO: 6 or encoded by the nucleotide sequence of SEQ ID NO: 17); an intracellular domain, e.g., a 4-1BB intracellular domain (e.g., including the amino acid sequence of SEQ ID NO: 7 or encoded by the nucleotide sequence of SEQ ID NO: 18; and a functional signaling domain, e.g., a CD3 zeta domain (e.g., including amino acid sequence of SEQ ID NO: 9 or 10, or encoded by the nucleotide sequence of SEQ ID NO: 20 or 21). In certain embodiments, the domains are contiguous with and in the same reading frame to form a single fusion protein. In other embodiments, the domain are in separate polypeptides, e.g., as in an RCAR molecule as described herein.

[0311] In certain embodiments, the full length BCMA CAR molecule includes the amino acid sequence of, or is encoded by the nucleotide sequence of, BCMA-1, BCMA-2, BCMA-3, BCMA-4, BCMA-5, BCMA-6, BCMA-7, BCMA-8, BCMA-9, BCMA-10, BCMA-11, BCMA-12, BCMA-13, BCMA-14, BCMA-15, 149362, 149363, 149364, 149365, 149366, 149367, 149368, 149369, BCMA_EBB-C1978-A4, BCMA_EBB-C1978-G1, BCMA_EBB-C1979-C1, BCMA_EBB-C1978-C7, BCMA_EBB-C1978-D10, BCMA_EBB-C1979-C12, BCMA_EBB-C1980-G4, BCMA_EBB-C1980-D2, BCMA_EBB-C1978-A10, BCMA_EBB-C1978-D4, BCMA_EBB-C1980-A2, BCMA_EBB-C1981-C3, BCMA_EBB-C1978-G4, A7D12.2, C11D5.3, C12A3.2, or C13F12.1 provided in Table 1 or 16, or a sequence substantially (e.g., 95-99%) identical thereto.

[0312] In certain embodiments, the BCMA CAR molecule, or the anti-BCMA antigen binding domain, includes the scFv amino acid sequence of BCMA-1, BCMA-2, BCMA-3, BCMA-4, BCMA-5, BCMA-6, BCMA-7, BCMA-8, BCMA-9, BCMA-10, BCMA-11, BCMA-12, BCMA-13, BCMA-14, BCMA-15, 149362, 149363, 149364, 149365, 149366, 149367, 149368, 149369, BCMA_EBB-C1978-A4, BCMA_EBB-C1978-G1, BCMA_EBB-C1979-C1, BCMA_EBB-C1978-C7, BCMA_EBB-C1978-D10, BCMA_EBB-C1979-C12, BCMA_EBB-C1980-G4, BCMA_EBB-C1980-D2, BCMA_EBB-C1978-A10, BCMA_EBB-C1978-D4, BCMA_EBB-C1980-A2, BCMA_EBB-C1981-C3, BCMA_EBB-C1978-G4, A7D12.2, C11D5.3, C12A3.2, or C13F12.1 provided in Table 1 or 16 (with or without the leader sequence), or a sequence substantially identical (e.g., 95-99% identical, or up to 20, 15, 10, 8, 6, 5, 4, 3, 2, or 1 amino acid changes, e.g., substitutions (e.g., conservative substitutions)) to any of the aforesaid sequences.

[0313] In certain embodiments, the BCMA CAR molecule, or the anti-BCMA antigen binding domain, includes the heavy chain variable region and/or the light chain variable region of BCMA-1, BCMA-2, BCMA-3, BCMA-4, BCMA-5, BCMA-6, BCMA-7, BCMA-8, BCMA-9, BCMA-10, BCMA-11, BCMA-12, BCMA-13, BCMA-14, BCMA-15, 149362, 149363, 149364, 149365, 149366, 149367, 149368, 149369, BCMA_EBB-C1978-A4, BCMA_EBB-C1978-G1, BCMA_EBB-C1979-C1, BCMA_EBB-C1978-C7, BCMA_EBB-C1978-D10, BCMA_EBB-C1979-C12, BCMA_EBB-C1980-G4, BCMA_EBB-C1980-D2, BCMA_EBB-C1978-A10, BCMA_EBB-C1978-D4, BCMA_EBB-C1980-A2, BCMA_EBB-C1981-C3, BCMA_EBB-C1978-G4, A7D12.2, C11D5.3, C12A3.2, or C13F12.1 provided in Table 1 or 16, or a sequence substantially identical (e.g., 95-99% identical, or up to 20, 15, 10, 8, 6, 5, 4, 3, 2, or 1 amino acid changes, e.g., substitutions (e.g., conservative substitutions)) to any of the aforesaid sequences.

[0314] In certain embodiments, the BCMA CAR molecule, or the anti-BCMA antigen binding domain, includes one, two or three CDRs from the heavy chain variable region (e.g., HCDR1, HCDR2 and/or HCDR3), provided in Table 20; and/or one, two or three CDRs from the light chain variable region (e.g., LCDR1, LCDR2 and/or LCDR3) of BCMA-1, BCMA-2, BCMA-3, BCMA-4, BCMA-5, BCMA-6, BCMA-7, BCMA-8, BCMA-9, BCMA-10, BCMA-11, BCMA-12, BCMA-13, BCMA-14, BCMA-15, 149362, 149363, 149364, 149365, 149366, 149367, 149368, 149369, BCMA_EBB-C1978-A4, BCMA_EBB-C1978-G1, BCMA_EBB-C1979-C1, BCMA_EBB-C1978-C7, BCMA_EBB-C1978-D10, BCMA_EBB-C1979-C12, BCMA_EBB-C1980-G4, BCMA_EBB-C1980-D2, BCMA_EBB-C1978-A10, BCMA_EBB-C1978-D4, BCMA_EBB-C1980-A2, BCMA_EBB-C1981-C3, BCMA_EBB-C1978-G4, A7D12.2, C11D5.3, C12A3.2, or C13F12.1, provided in Table 21; or a sequence substantially identical (e.g., 95-99% identical, or up to 20, 15, 10, 8, 6, 5, 4, 3, 2, or 1 amino acid changes, e.g., substitutions (e.g., conservative substitutions)) to any of the aforesaid sequences.

[0315] In certain embodiments, the BCMA CAR molecule, or the anti-BCMA antigen binding domain, includes one, two or three CDRs from the heavy chain variable region (e.g., HCDR1, HCDR2 and/or HCDR3), provided in Table 22; and/or one, two or three CDRs from the light chain variable region (e.g., LCDR1, LCDR2 and/or LCDR3) of BCMA-1, BCMA-2, BCMA-3, BCMA-4, BCMA-5, BCMA-6, BCMA-7, BCMA-8, BCMA-9, BCMA-10, BCMA-11, BCMA-12, BCMA-13, BCMA-14, BCMA-15, 149362, 149363, 149364, 149365, 149366, 149367, 149368, 149369, BCMA_EBB-C1978-A4, BCMA_EBB-C1978-G1, BCMA_EBB-C1979-C1, BCMA_EBB-C1978-C7, BCMA_EBB-C1978-D10, BCMA_EBB-C1979-C12, BCMA_EBB-C1980-G4, BCMA_EBB-C1980-D2, BCMA_EBB-C1978-A10, BCMA_EBB-C1978-D4, BCMA_EBB-C1980-A2, BCMA_EBB-C1981-C3, BCMA_EBB-C1978-G4, A7D12.2, C11D5.3, C12A3.2, or C13F12.1, provided in Table 23; or a sequence substantially identical (e.g., 95-99% identical, or up to 20, 15, 10, 8, 6, 5, 4, 3, 2, or 1 amino acid changes, e.g., substitutions (e.g., conservative substitutions)) to any of the aforesaid sequences.

[0316] In certain embodiments, the BCMA CAR molecule, or the anti-BCMA antigen binding domain, includes one, two or three CDRs from the heavy chain variable region (e.g., HCDR1, HCDR2 and/or HCDR3), provided in Table 24; and/or one, two or three CDRs from the light chain variable region (e.g., LCDR1, LCDR2 and/or LCDR3) of BCMA-1, BCMA-2, BCMA-3, BCMA-4, BCMA-5, BCMA-6, BCMA-7, BCMA-8, BCMA-9, BCMA-10, BCMA-11, BCMA-12, BCMA-13, BCMA-14, BCMA-15, 149362, 149363, 149364, 149365, 149366, 149367, 149368, 149369, BCMA_EBB-C1978-A4, BCMA_EBB-C1978-G1, BCMA_EBB-C1979-C1, BCMA_EBB-C1978-C7, BCMA_EBB-C1978-D10, BCMA_EBB-C1979-C12, BCMA_EBB-C1980-G4, BCMA_EBB-C1980-D2, BCMA_EBB-C1978-A10, BCMA_EBB-C1978-D4, BCMA_EBB-C1980-A2, BCMA_EBB-C1981-C3, BCMA_EBB-C1978-G4, A7D12.2, C11D5.3, C12A3.2, or C13F12.1, provided in Table 25; or a sequence substantially identical (e.g., 95-99% identical, or up to 20, 15, 10, 8, 6, 5, 4, 3, 2, or 1 amino acid changes, e.g., substitutions (e.g., conservative substitutions)) to any of the aforesaid sequences.

[0317] The sequences of human CDR sequences of the scFv domains are shown in Tables 20, 22, and 24 for the heavy chain variable domains and in Tables 21, 23, and 25 for the light chain variable domains. “ID” stands for the respective SEQ ID NO for each CDR.

TABLE 20
Heavy Chain Variable Domain CDRs according to the Kabat numbering scheme
(Kabat et al. (1991), “Sequences of Proteins of Immunological Interest,” 5th
Ed. Public Health Service, National Institutes of Health, Bethesda, MD)

| Candidate | HCDR1 | ID | HCDR2 | ID | HCDR3 | ID |
|---|---|---|---|---|---|---|
| 139109 | NHGMS | 394 | GIVYSGSTYYAASV | 434 | HGGESDV | 474 |
| | | | KG | | | |
| 139103 | NYAMS | 384 | GISRSGENTYYADS | 424 | SPAHYYGGMDV | 464 |
| | | | VKG | | | |
| 139105 | DYAMH | 385 | GISWNSGSIGYADSV | 425 | HSFLAY | 465 |
| | | | KG | | | |
| 139111 | NHGMS | 386 | GIVYSGSTYYAASV | 426 | HGGESDV | 466 |
| | | | KG | | | |
| 139100 | NFGIN | 387 | WINPKNNNTNYAQ | 427 | GPYYYQSYMDV | 467 |
| | | | KFQG | | | |
| 139101 | SDAMT | 388 | VISGSGGTTYYADS | 428 | LDSSGYYYARGPRY | 468 |
| | | | VKG | | | |
| 139102 | NYGIT | 389 | WISAYNGNTNYAQ | 429 | GPYYYYMDV | 469 |
| | | | KFQG | | | |
| 139104 | NHGMS | 390 | GIVYSGSTYYAASV | 430 | HGGESDV | 470 |
| | | | KG | | | |
| 139106 | NHGMS | 391 | GIVYSGSTYYAASV | 431 | HGGESDV | 471 |
| | | | KG | | | |
| 139107 | NHGMS | 392 | GIVYSGSTYYAASV | 432 | HGGESDV | 472 |
| | | | KG | | | |
| 139108 | DYYMS | 393 | YISSSGSTIYYADSV | 433 | ESGDGMDV | 473 |
| | | | KG | | | |
| 139110 | DYYMS | 395 | YISSSGNTIYYADSV | 435 | STMVREDY | 475 |
| | | | KG | | | |
| 139112 | NHGMS | 396 | GIVYSGSTYYAASV | 436 | HGGESDV | 476 |
| | | | KG | | | |
| 139113 | NHGMS | 397 | GIVYSGSTYYAASV | 437 | HGGESDV | 477 |
| | | | KG | | | |
| 139114 | NHGMS | 398 | GIVYSGSTYYAASV | 438 | HGGESDV | 478 |
| | | | KG | | | |
| 149362 | SSYYYWG | 399 | SIYYSGSAYYNPSLK | 439 | HWQEWPDAFDI | 479 |
| | | | S | | | |
| 149363 | TSGMCVS | 400 | RIDWDEDKFYSTSL | 440 | SGAGGTSATAFDI | 480 |
| | | | KT | | | |
| 149364 | SYSMN | 401 | SISSSSSYIYYADSVK | 441 | TIAAVYAFDI | 481 |
| | | | G | | | |
| 149365 | DYYMS | 402 | YISSSGSTIYYADSV | 442 | DLRGAFDI | 482 |
| | | | KG | | | |
| 149366 | SHYIH | 403 | MINPSGGVTAYSQT | 443 | EGSGSGWYFDF | 483 |
| | | | LQG | | | |
| 149367 | SGGYYWS | 404 | YIYYSGSTYYNPSLK | 444 | AGIAARLRGAFDI | 484 |
| | | | S | | | |
| 149368 | SYAIS | 405 | GIIPIFGTANYAQKF | 445 | RGGYQLLRWDVGLL | 485 |
| | | | QG | | RSAFDI | |
| 149369 | SNSAAWN | 406 | RTYYRSKWYSFYAI | 446 | SSPEGLFLYWFDP | 486 |
| | | | SLKS | | | |
| BCMA_EBB- | SYAMS | 407 | AISGSGGSTYYADS | 447 | VEGSGSLDY | 487 |
| C1978-A4 | | | VKG | | | |
| BCMA_EBB- | RYPMS | 408 | GISDSGVSTYYADS | 448 | RAGSEASDI | 488 |
| C1978-G1 | | | AKG | | | |
| BCMA_EBB- | SYAMS | 409 | AISGSGGSTYYADS | 449 | ATYKRELRYYYGM | 489 |
| C1979-C1 | | | VKG | | DV | |
| BCMA_EBB- | SYAMS | 410 | AISGSGGSTYYADS | 450 | ATYKRELRYYYGM | 490 |
| C1978-C7 | | | VKG | | DV | |
| BCMA_EBB- | DYAMH | 411 | GISWNSGSIGYADSV | 451 | VGKAVPDV | 491 |
| C1978-D10 | | | KG | | | |
| BCMA_EBB- | DYAMH | 412 | SINWKGNSLAYGDS | 452 | HQGVAYYNYAMDV | 492 |
| C1979-C12 | | | VKG | | | |
| BCMA_EBB- | SYAMS | 413 | AISGSGGSTYYADS | 453 | VVRDGMDV | 493 |
| C1980-G4 | | | VKG | | | |
| BCMA_EBB- | SYAMS | 414 | AISGSGGSTYYADS | 454 | IPQTGTFDY | 494 |
| C1980-D2 | | | VKG | | | |
| BCMA_EBB- | SYAMS | 415 | AISGSGGSTYYADS | 455 | ANYKRELRYYYGM | 495 |
| C1978-A10 | | | VKG | | DV | |
| BCMA_EBB- | SYAMS | 416 | AISGSGGSTYYADS | 456 | ALVGATGAFDI | 496 |
| C1978-D4 | | | VKG | | | |
| BCMA_EBB- | SYAMS | 417 | AISGSGGSTYYADS | 457 | WFGEGFDP | 497 |
| C1980-A2 | | | VKG | | | |
| BCMA_EBB- | SYAMS | 418 | AISGSGGSTYYADS | 458 | VGYDSSGYYRDYYG | 498 |
| C1981-C3 | | | VKG | | MDV | |
| BCMA_EBB- | SYAMS | 419 | AISGSGGSTYYADS | 459 | MGWSSGYLGAFDI | 499 |
| C1978-G4 | | | VKG | | | |
| A7D12.2 | NFGMN | 420 | WINTYTGESYFADD | 460 | GEIYYGYDGGFAY | 500 |
| | | | FKG | | | |
| C11D5.3 | DYSIN | 421 | WINTETREPAYAYD | 461 | DYSYAMDY | 501 |
| | | | FRG | | | |
| C12A3.2 | HYSMN | 422 | RINTESGVPIYADDF | 462 | DYLYSLDF | 502 |
| | | | KG | | | |
| C13F12.1 | HYSMN | 423 | RINTETGEPLYADDF | 463 | DYLYSCDY | 503 |
| | | | KG | | | |

TABLE 21
Light Chain Variable Domain CDRs according to the Kabat numbering scheme
(Kabat et al. (1991), “Sequences of Proteins of Immunological Interest,” 5th
Ed. Public Health Service, National Institutes of Health, Bethesda, MD)

| Candidate | LCDR1 | ID | LCDR2 | ID | LCDR3 | ID |
|---|---|---|---|---|---|---|
| 139109 | RASQSISSYLN | 514 | AASSLQS | 554 | QQSYSTPYT | 594 |
| 139103 | RASQSISSSFLA | 504 | GASRRAT | 544 | QQYHSSPSWT | 584 |
| 139105 | RSSQSLLHSNGYNYLD | 505 | LGSNRAS | 545 | MQALQTPYT | 585 |
| 139111 | KSSQSLLRNDGKTPLY | 506 | EVSNRFS | 546 | MQNIQFPS | 586 |
| 139100 | RSSQSLLHSNGYNYLN | 507 | LGSKRAS | 547 | MQALQTPYT | 587 |
| 139101 | RASQSISSYLN | 508 | GASTLAS | 548 | QQSYKRAS | 588 |
| 139102 | RSSQSLLYSNGYNYVD | 509 | LGSNRAS | 549 | MQGRQFPYS | 589 |
| 139104 | RASQSVSSNLA | 510 | GASTRAS | 550 | QQYGSSLT | 590 |
| 139106 | RASQSVSSKLA | 511 | GASIRAT | 551 | QQYGSSSWT | 591 |
| 139107 | RASQSVGSTNLA | 512 | DASNRAT | 552 | QQYGSSPPWT | 592 |
| 139108 | RASQSISSYLN | 513 | AASSLQS | 553 | QQSYTLA | 593 |
| 139110 | KSSESLVHNSGKTYLN | 515 | EVSNRDS | 555 | MQGTHWPGT | 595 |
| 139112 | QASEDINKFLN | 516 | DASTLQT | 556 | QQYESLPLT | 596 |
| 139113 | RASQSVGSNLA | 517 | GASTRAT | 557 | QQYNDWLPVT | 597 |
| 139114 | RASQSIGSSSLA | 518 | GASSRAS | 558 | QQYAGSPPFT | 598 |
| 149362 | KASQDIDDAMN | 519 | SATSPVP | 559 | LQHDNFPLT | 599 |
| 149363 | RASQDIYNNLA | 520 | AANKSQS | 560 | QHYYRFPYS | 600 |
| 149364 | RSSQSLLHSNGYNYLD | 521 | LGSNRAS | 561 | MQALQTPYT | 601 |
| 149365 | GGNNIGTKSVH | 522 | DDSVRPS | 562 | QVWDSDSEHV | 602 |
| | | | | | V | |
| 149366 | SGDGLSKKYVS | 523 | RDKERPS | 563 | QAWDDTTVV | 603 |
| 149367 | RASQGIRNWLA | 524 | AASNLQS | 564 | QKYNSAPFT | 604 |
| 149368 | GGNNIGSKSVH | 525 | GKNNRPS | 565 | SSRDSSGDHLR | 605 |
| | | | | | V | |
| 149369 | QGDSLGNYYAT | 526 | GTNNRPS | 566 | NSRDSSGHHLL | 606 |
| BCMAEBB- | RASQSVSSAYLA | 527 | GASTRAT | 567 | QHYGSSFNGSS | 607 |
| C1978-A4 | | | | | LFT | |
| BCMAEBB- | RASQSVSNSLA | 528 | DASSRAT | 568 | QQFGTSSGLT | 608 |
| C1978-G1 | | | | | | |
| BCMAEBB- | RASQSVSSSFLA | 529 | GASSRAT | 569 | QQYHSSPSWT | 609 |
| C1979-C1 | | | | | | |
| BCMA EBB- | RASQSVSTTFLA | 530 | GSSNRAT | 570 | QQYHSSPSWT | 610 |
| C1978-C7 | | | | | | |
| BCMAEBB- | RASQSISSYLN | 531 | AASSLQS | 571 | QQSYSTPYS | 611 |
| C1978-D10 | | | | | | |
| BCMAEBB- | RATQSIGSSFLA | 532 | GASQRAT | 572 | QHYESSPSWT | 612 |
| C1979-C12 | | | | | | |
| BCMA_EBB- | RASQSVSSSYLA | 533 | GASSRAT | 573 | QQYGSPPRFT | 613 |
| C1980-G4 | | | | | | |
| BCMA_EBB- | RASQSVSSSYLA | 534 | GASSRAT | 574 | QHYGSSPSWT | 614 |
| C1980-D2 | | | | | | |
| BCMA_EBB- | RASQRVASNYLA | 535 | GASSRAT | 575 | QHYDSSPSWT | 615 |
| C1978-A10 | | | | | | |
| BCMA_EBB- | RASQSLSSNFLA | 536 | GASNWAT | 576 | QYYGTSPMYT | 616 |
| C1978-D4 | | | | | | |
| BCMA_EBB- | RSSQSLLHSNGYNYLD | 537 | LGSNRAS | 577 | MQALQTPLT | 617 |
| C1980-A2 | | | | | | |
| BCMA_EBB- | RASQSVSSSYLA | 538 | GTSSRAT | 578 | QHYGNSPPKFT | 618 |
| C1981-C3 | | | | | | |
| BCMA_EBB- | RASQSVASSFLA | 539 | GASGRAT | 579 | QHYGGSPRLT | 619 |
| C1978-G4 | | | | | | |
| A7D12.2 | RASQDVNTAVS | 540 | SASYRYT | 580 | QQHYSTPWT | 620 |
| C11D5.3 | RASESVSVIGAHLIH | 541 | LASNLET | 581 | LQSRIFPRT | 621 |
| C12A3.2 | RASESVTILGSHLIY | 542 | LASNVQT | 582 | LQSRTIPRT | 622 |
| C13F12.1 | RASESVTILGSHLIY | 543 | LASNVQT | 583 | LQSRTIPRT | 623 |

TABLE 22
Heavy Chain Variable Domain CDRs according to the Chothia numbering scheme
(Al-Lazikani et al., (1997) JMB 273, 927-948)

| Candidate | HCDR1 | ID | HCDR2 | ID | HCDR3 | ID |
|---|---|---|---|---|---|---|
| 139109 | GFALSNH | 634 | VYSGS | 674 | HGGESDV | 714 |
| 139103 | GFTFSNY | 624 | SRSGEN | 664 | SPAHYYGGMDV | 704 |
| 139105 | GFTFDDY | 625 | SWNSGS | 665 | HSFLAY | 705 |
| 139111 | GFALSNH | 626 | VYSGS | 666 | HGGESDV | 706 |
| 139100 | GYIFDNF | 627 | NPKNNN | 667 | GPYYYQSYMDV | 707 |
| 139101 | GFTFSSD | 628 | SGSGGT | 668 | LDSSGYYYARGPRY | 708 |
| 139102 | GYTFSNY | 629 | SAYNGN | 669 | GPYYYYMDV | 709 |
| 139104 | GFALSNH | 630 | VYSGS | 670 | HGGESDV | 710 |
| 139106 | GFALSNH | 631 | VYSGS | 671 | HGGESDV | 711 |
| 139107 | GFALSNH | 632 | VYSGS | 672 | HGGESDV | 712 |
| 139108 | GFTFSDY | 633 | SSSGST | 673 | ESGDGMDV | 713 |
| 139110 | GFTFSDY | 635 | SSSGNT | 675 | STMVREDY | 715 |
| 139112 | GFALSNH | 636 | VYSGS | 676 | HGGESDV | 716 |
| 139113 | GFALSNH | 637 | VYSGS | 677 | HGGESDV | 717 |
| 139114 | GFALSNH | 638 | VYSGS | 678 | HGGESDV | 718 |
| 149362 | GGSISSSYY | 639 | YYSGS | 679 | HWQEWPDAFDI | 719 |
| 149363 | GFSLRTSGM | 640 | DWDED | 680 | SGAGGTSATAFDI | 720 |
| 149364 | GFTFSSY | 641 | SSSSSY | 681 | TIAAVYAFDI | 721 |
| 149365 | GFTFSDY | 642 | SSSGST | 682 | DLRGAFDI | 722 |
| 149366 | GYTVTSH | 643 | NPSGGV | 683 | EGSGSGWYFDF | 723 |
| 149367 | GGSISSGGY | 644 | YYSGS | 684 | AGIAARLRGAFDI | 724 |
| 149368 | GFTFSSY | 645 | IPIFGT | 685 | RGGYQLLRWDVGLL | 725 |
| | | | | | RSAFDI | |
| 149369 | GDSVSSNSA | 646 | YYRSKWY | 686 | SSPEGLFLYWFDP | 726 |
| BCMA_EBB- | GFTFSSY | 647 | SGSGGS | 687 | VEGSGSLDY | 727 |
| C1978-A4 | | | | | | |
| BCMA_EBB- | GITFSRY | 648 | SDSGVS | 688 | RAGSEASDI | 728 |
| C1978-G1 | | | | | | |
| BCMA_EBB- | GFTFSSY | 649 | SGSGGS | 689 | ATYKRELRYYYGMD | 729 |
| C1979-C1 | | | | | V | |
| BCMA_EBB- | GFTFSSY | 650 | SGSGGS | 690 | ATYKRELRYYYGMD | 730 |
| C1978-C7 | | | | | V | |
| BCMA_EBB- | GFTFDDY | 651 | SWNSGS | 691 | VGKAVPDV | 731 |
| C1978-D10 | | | | | | |
| BCMA_EBB- | GFTFDDY | 652 | NWKGNS | 692 | HQGVAYYNYAMDV | 732 |
| C1979-C12 | | | | | | |
| BCMA_EBB- | GFTFSSY | 653 | SGSGGS | 693 | VVRDGMDV | 733 |
| C1980-G4 | | | | | | |
| BCMA_EBB- | GFTFSSY | 654 | SGSGGS | 694 | IPQTGTFDY | 734 |
| C1980-D2 | | | | | | |
| BCMA_EBB- | GFTFSSY | 655 | SGSGGS | 695 | ANYKRELRYYYGMD | 735 |
| C1978-A10 | | | | | V | |
| BCMA_EBB- | GFSFSSY | 656 | SGSGGS | 696 | ALVGATGAFDI | 736 |
| C1978-D4 | | | | | | |
| BCMA_EBB- | GFTFSSY | 657 | SGSGGS | 697 | WFGEGFDP | 737 |
| C1980-A2 | | | | | | |
| BCMA_EBB- | GFTFSSY | 658 | SGSGGS | 698 | VGYDSSGYYRDYYG | 738 |
| C1981-C3 | | | | | MDV | |
| BCMA_EBB- | GFTFSSY | 659 | SGSGGS | 699 | MGWSSGYLGAFDI | 739 |
| C1978-G4 | | | | | | |
| A7D12.2 | GYTFTNF | 660 | NTYTGE | 700 | GEIYYGYDGGFAY | 740 |
| C11D5.3 | GYTFTDY | 661 | NTETRE | 701 | DYSYAMDY | 741 |
| C12A3.2 | GYTFRHY | 662 | NTESGV | 702 | DYLYSLDF | 742 |
| C13F12.1 | GYTFTHY | 663 | NTETGE | 703 | DYLYSCDY | 743 |

TABLE 23
Light Chain Variable Domain CDRs according to the Chothia numbering scheme
(Al-Lazikani et al., (1997) JMB 273,927-948)

| Candidate | LCDR1 | ID | LCDR2 | ID | LCDR3 | ID |
|---|---|---|---|---|---|---|
| 139109 | SQSISSY | 754 | AAS | 794 | SYSTPY | 834 |
| 139103 | SQSISSSF | 744 | GAS | 784 | YHSSPSW | 824 |
| 139105 | SQSLLHSNGYNY | 745 | LGS | 785 | ALQTPY | 825 |
| 139111 | SQSLLRNDGKTP | 746 | EVS | 786 | NIQFP | 826 |
| 139100 | SQSLLHSNGYNY | 747 | LGS | 787 | ALQTPY | 827 |
| 139101 | SQSISSY | 748 | GAS | 788 | SYKRA | 828 |
| 139102 | SQSLLYSNGYNY | 749 | LGS | 789 | GRQFPY | 829 |
| 139104 | SQSVSSN | 750 | GAS | 790 | YGSSL | 830 |
| 139106 | SQSVSSK | 751 | GAS | 791 | YGSSSW | 831 |
| 139107 | SQSVGSTN | 752 | DAS | 792 | YGSSPPW | 832 |
| 139108 | SQSISSY | 753 | AAS | 793 | SYTL | 833 |
| 139110 | SESLVHNSGKTY | 755 | EVS | 795 | GTHWPG | 835 |
| 139112 | SEDINKF | 756 | DAS | 796 | YESLPL | 836 |
| 139113 | SQSVGSN | 757 | GAS | 797 | YNDWLPV | 837 |
| 139114 | SQSIGSSS | 758 | GAS | 798 | YAGSPPF | 838 |
| 149362 | SQDIDDA | 759 | SAT | 799 | HDNFPL | 839 |
| 149363 | SQDIYNN | 760 | AAN | 800 | YYRFPY | 840 |
| 149364 | SQSLLHSNGYNY | 761 | LGS | 801 | ALQTPY | 841 |
| 149365 | NNIGTKS | 762 | DDS | 802 | WDSDSEHV | 842 |
| 149366 | DGLSKKY | 763 | RDK | 803 | WDDTTV | 843 |
| 149367 | SQGIRNW | 764 | AAS | 804 | YNSAPF | 844 |
| 149368 | NNIGSKS | 765 | GKN | 805 | RDSSGDHLR | 845 |
| 149369 | DSLGNYY | 766 | GTN | 806 | RDSSGHHL | 846 |
| BCMA_EBB- | SQSVSSAY | 767 | GAS | 807 | YGSSFNGSSLF | 847 |
| C1978-A4 | | | | | | |
| BCMA_EBB- | SQSVSNS | 768 | DAS | 808 | FGTSSGL | 848 |
| C1978-G1 | | | | | | |
| BCMA_EBB- | SQSVSSSF | 769 | GAS | 809 | YHSSPSW | 849 |
| C1979-C1 | | | | | | |
| BCMA_EBB- | SQSVSTTF | 770 | GSS | 810 | YHSSPSW | 850 |
| C1978-C7 | | | | | | |
| BCMA_EBB- | SQSISSY | 771 | AAS | 811 | SYSTPY | 851 |
| C1978-D10 | | | | | | |
| BCMA_EBB- | TQSIGSSF | 772 | GAS | 812 | YESSPSW | 852 |
| C1979-C12 | | | | | | |
| BCMA_EBB- | SQSVSSSY | 773 | GAS | 813 | YGSPPRF | 853 |
| C1980-G4 | | | | | | |
| BCMA_EBB- | SQSVSSSY | 774 | GAS | 814 | YGSSPSW | 854 |
| C1980-D2 | | | | | | |
| BCMA_EBB- | SQRVASNY | 775 | GAS | 815 | YDSSPSW | 855 |
| C1978-A10 | | | | | | |
| BCMA_EBB- | SQSLSSNF | 776 | GAS | 816 | YGTSPMY | 856 |
| C1978-D4 | | | | | | |
| BCMA_EBB- | SQSLLHSNGYNY | 777 | LGS | 817 | ALQTPL | 857 |
| C1980-A2 | | | | | | |
| BCMA_EBB- | SQSVSSSY | 778 | GTS | 818 | YGNSPPKF | 858 |
| C1981-C3 | | | | | | |
| BCMA_EBB- | SQSVASSF | 779 | GAS | 819 | YGGSPRL | 859 |
| C1978-G4 | | | | | | |
| A7D12.2 | SQDVNTA | 780 | SAS | 820 | HYSTPW | 860 |
| C11D5.3 | SESVSVIGAHL | 781 | LAS | 821 | SRIFPR | 861 |
| C12A3.2 | SESVTILGSHL | 782 | LAS | 822 | SRTIPR | 862 |
| C13F12.1 | SESVTILGSHL | 783 | LAS | 823 | SRTIPR | 863 |

TABLE 24
Heavy Chain Variable Domain CDRs according to a combination of the Kabat numbering
scheme (Kabat et al. (1991), “Sequences of Proteins of Immunological Interest,” 5th
Ed. Public Health Service, National Institutes of Health, Bethesda, MD) and the Chothia
numbering scheme (Al-Lazikani et al., (1997) JMB 273,927-948).

| Candidate | HCDR1 | ID | HCDR2 | ID | HCDR3 | ID |
|---|---|---|---|---|---|---|
| 139109 | GFALSNHGMS | 874 | GIVYSGSTYYAAS | 914 | HGGESDV | 954 |
| | | | VKG | | | |
| 139103 | GFTFSNYAMS | 864 | GISRSGENTYYAD | 904 | SPAHYYGGMDV | 944 |
| | | | SVKG | | | |
| 139105 | GFTFDDYAMH | 865 | GISWNSGSIGYAD | 905 | HSFLAY | 945 |
| | | | SVKG | | | |
| 139111 | GFALSNHGMS | 866 | GIVYSGSTYYAAS | 906 | HGGESDV | 946 |
| | | | VKG | | | |
| 139100 | GYIFDNFGIN | 867 | WINPKNNNTNYA | 907 | GPYYYQSYMDV | 947 |
| | | | QKFQG | | | |
| 139101 | GFTFSSDAMT | 868 | VISGSGGTTYYAD | 908 | LDSSGYYYARGPR | 948 |
| | | | SVKG | | Y | |
| 139102 | GYTFSNYGIT | 869 | WISAYNGNTNYA | 909 | GPYYYYMDV | 949 |
| | | | QKFQG | | | |
| 139104 | GFALSNHGMS | 870 | GIVYSGSTYYAAS | 910 | HGGESDV | 950 |
| | | | VKG | | | |
| 139106 | GFALSNHGMS | 871 | GIVYSGSTYYAAS | 911 | HGGESDV | 951 |
| | | | VKG | | | |
| 139107 | GFALSNHGMS | 872 | GIVYSGSTYYAAS | 912 | HGGESDV | 952 |
| | | | VKG | | | |
| 139108 | GFTFSDYYMS | 873 | YISSSGSTIYYADS | 913 | ESGDGMDV | 953 |
| | | | VKG | | | |
| 139110 | GFTFSDYYMS | 875 | YISSSGNTIYYAD | 915 | STMVREDY | 955 |
| | | | SVKG | | | |
| 139112 | GFALSNHGMS | 876 | GIVYSGSTYYAAS | 916 | HGGESDV | 956 |
| | | | VKG | | | |
| 139113 | GFALSNHGMS | 877 | GIVYSGSTYYAAS | 917 | HGGESDV | 957 |
| | | | VKG | | | |
| 139114 | GFALSNHGMS | 878 | GIVYSGSTYYAAS | 918 | HGGESDV | 958 |
| | | | VKG | | | |
| 149362 | GGSISSSYYYW | 879 | SIYYSGSAYYNPS | 919 | HWQEWPDAFDI | 959 |
| | G | | LKS | | | |
| 149363 | GFSLRTSGMC | 880 | RIDWDEDKFYSTS | 920 | SGAGGTSATAFDI | 960 |
| | VS | | LKT | | | |
| 149364 | GFTFSSYSMN | 881 | SISSSSSYIYYADS | 921 | TIAAVYAFDI | 961 |
| | | | VKG | | | |
| 149365 | GFTFSDYYMS | 882 | YISSSGSTIYYADS | 922 | DLRGAFDI | 962 |
| | | | VKG | | | |
| 149366 | GYTVTSHYIH | 883 | MINPSGGVTAYS | 923 | EGSGSGWYFDF | 963 |
| | | | QTLQG | | | |
| 149367 | GGSISSGGYY | 884 | YIYYSGSTYYNPS | 924 | AGIAARLRGAFDI | 964 |
| | WS | | LKS | | | |
| 149368 | GGTFSSYAIS | 885 | GIIPIFGTANYAQ | 925 | RGGYQLLRWDVG | 965 |
| | | | KFQG | | LLRSAFDI | |
| 149369 | GDSVSSNSAA | 886 | RTYYRSKWYSFY | 926 | SSPEGLFLYWFDP | 966 |
| | WN | | AISLKS | | | |
| BCMA_EBB- | GFTFSSYAMS | 887 | AISGSGGSTYYAD | 927 | VEGSGSLDY | 967 |
| C1978-A4 | | | SVKG | | | |
| BCMA_EBB- | GITFSRYPMS | 888 | GISDSGVSTYYAD | 928 | RAGSEASDI | 968 |
| C1978-G1 | | | SAKG | | | |
| BCMA_EBB- | GFTFSSYAMS | 889 | AISGSGGSTYYAD | 929 | ATYKRELRYYYG | 969 |
| C1979-C1 | | | SVKG | | MDV | |
| BCMA_EBB- | GFTFSSYAMS | 890 | AISGSGGSTYYAD | 930 | ATYKRELRYYYG | 970 |
| C1978-C7 | | | SVKG | | MDV | |
| BCMA_EBB- | GFTFDDYAMH | 891 | GISWNSGSIGYAD | 931 | VGKAVPDV | 971 |
| C1978-D10 | | | SVKG | | | |
| BCMA_EBB- | GFTFDDYAMH | 892 | SINWKGNSLAYG | 932 | HQGVAYYNYAM | 972 |
| C1979-C12 | | | DSVKG | | DV | |
| BCMA_EBB- | GFTFSSYAMS | 893 | AISGSGGSTYYAD | 933 | VVRDGMDV | 973 |
| C1980-G4 | | | SVKG | | | |
| BCMA_EBB- | GFTFSSYAMS | 894 | AISGSGGSTYYAD | 934 | IPQTGTFDY | 974 |
| C1980-D2 | | | SVKG | | | |
| BCMA_EBB- | GFTFSSYAMS | 895 | AISGSGGSTYYAD | 935 | ANYKRELRYYYG | 975 |
| C1978-A10 | | | SVKG | | MDV | |
| BCMA_EBB- | GFSFSSYAMS | 896 | AISGSGGSTYYAD | 936 | ALVGATGAFDI | 976 |
| C1978-D4 | | | SVKG | | | |
| BCMA_EBB- | GFTFSSYAMS | 897 | AISGSGGSTYYAD | 937 | WFGEGFDP | 977 |
| C1980-A2 | | | SVKG | | | |
| BCMA_EBB- | GFTFSSYAMS | 898 | AISGSGGSTYYAD | 938 | VGYDSSGYYRDY | 978 |
| C1981-C3 | | | SVKG | | YGMDV | |
| BCMA_EBB- | GFTFSSYAMS | 899 | AISGSGGSTYYAD | 939 | MGWSSGYLGAFD | 979 |
| C1978-G4 | | | SVKG | | I | |
| A7D12.2 | GYTFTNFGMN | 900 | WINTYTGESYFA | 940 | GEIYYGYDGGFAY | 980 |
| | | | DDFKG | | | |
| C11D5.3 | GYTFTDYSIN | 901 | WINTETREPAYA | 941 | DYSYAMDY | 981 |
| | | | YDFRG | | | |
| C12A3.2 | GYTFRHYSMN | 902 | RINTESGVPIYAD | 942 | DYLYSLDF | 982 |
| | | | DFKG | | | |
| C13F12.1 | GYTFTHYSMN | 903 | RINTETGEPLYAD | 943 | DYLYSCDY | 983 |
| | | | DFKG | | | |

TABLE 25
Light Chain Variable Domain CDRs according to a combination of the Kabat numbering
scheme (Kabat et al. (1991), “Sequences of Proteins of Immunological Interest,” 5th
Ed. Public Health Service, National Institutes of Health, Bethesda, MD) and the Chothia
numbering scheme (Al-Lazikani et al., (1997) JMB 273,927-948).

| Candidate | LCDR1 | ID | LCDR2 | ID | LCDR3 | ID |
|---|---|---|---|---|---|---|
| 139109 | RASQSISSYLN | 994 | AASSLQS | 1034 | QQSYSTPYT | 1074 |
| 139103 | RASQSISSSFLA | 984 | GASRRAT | 1024 | QQYHSSPSWT | 1064 |
| 139105 | RSSQSLLHSNGYNYLD | 985 | LGSNRAS | 1025 | MQALQTPYT | 1065 |
| 139111 | KSSQSLLRNDGKTPLY | 986 | EVSNRFS | 1026 | MQNIQFPS | 1066 |
| 139100 | RSSQSLLHSNGYNYLN | 987 | LGSKRAS | 1027 | MQALQTPYT | 1067 |
| 139101 | RASQSISSYLN | 988 | GASTLAS | 1028 | QQSYKRAS | 1068 |
| 139102 | RSSQSLLYSNGYNYVD | 989 | LGSNRAS | 1029 | MQGRQFPYS | 1069 |
| 139104 | RASQSVSSNLA | 990 | GASTRAS | 1030 | QQYGSSLT | 1070 |
| 139106 | RASQSVSSKLA | 991 | GASIRAT | 1031 | QQYGSSSWT | 1071 |
| 139107 | RASQSVGSTNLA | 992 | DASNRAT | 1032 | QQYGSSPPWT | 1072 |
| 139108 | RASQSISSYLN | 993 | AASSLQS | 1033 | QQSYTLA | 1073 |
| 139110 | KSSESLVHNSGKTYLN | 995 | EVSNRDS | 1035 | MQGTHWPGT | 1075 |
| 139112 | QASEDINKFLN | 996 | DASTLQT | 1036 | QQYESLPLT | 1076 |
| 139113 | RASQSVGSNLA | 997 | GASTRAT | 1037 | QQYNDWLPV | 1077 |
| | | | | | T | |
| 139114 | RASQSIGSSSLA | 998 | GASSRAS | 1038 | QQYAGSPPFT | 1078 |
| 149362 | KASQDIDDAMN | 999 | SATSPVP | 1039 | LQHDNFPLT | 1079 |
| 149363 | RASQDIYNNLA | 1000 | AANKSQS | 1040 | QHYYRFPYS | 1080 |
| 149364 | RSSQSLLHSNGYNYLD | 1001 | LGSNRAS | 1041 | MQALQTPYT | 1081 |
| 149365 | GGNNIGTKSVH | 1002 | DDSVRPS | 1042 | QVWDSDSEHV | 1082 |
| | | | | | V | |
| 149366 | SGDGLSKKYVS | 1003 | RDKERPS | 1043 | QAWDDTTVV | 1083 |
| 149367 | RASQGIRNWLA | 1004 | AASNLQS | 1044 | QKYNSAPFT | 1084 |
| 149368 | GGNNIGSKSVH | 1005 | GKNNRPS | 1045 | SSRDSSGDHL | 1085 |
| | | | | | RV | |
| 149369 | QGDSLGNYYAT | 1006 | GTNNRPS | 1046 | NSRDSSGHHL | 1086 |
| | | | | | L | |
| BCMA_EBB- | RASQSVSSAYLA | 1007 | GASTRAT | 1047 | QHYGSSFNGS | 1087 |
| C1978-A4 | | | | | SLFT | |
| BCMA EBB- | RASQSVSNSLA | 1008 | DASSRAT | 1048 | QQFGTSSGLT | 1088 |
| C1978-G1 | | | | | | |
| BCMA_EBB- | RASQSVSSSFLA | 1009 | GASSRAT | 1049 | QQYHSSPSWT | 1089 |
| C1979-C1 | | | | | | |
| BCMA_EBB- | RASQSVSTTFLA | 1010 | GSSNRAT | 1050 | QQYHSSPSWT | 1090 |
| C1978-C7 | | | | | | |
| BCMA_EBB- | RASQSISSYLN | 1011 | AASSLQS | 1051 | QQSYSTPYS | 1091 |
| C1978-D10 | | | | | | |
| BCMA_EBB- | RATQSIGSSFLA | 1012 | GASQRAT | 1052 | QHYESSPSWT | 1092 |
| C1979-C12 | | | | | | |
| BCMA_EBB- | RASQSVSSSYLA | 1013 | GASSRAT | 1053 | QQYGSPPRFT | 1093 |
| C1980-G4 | | | | | | |
| BCMA_EBB- | RASQSVSSSYLA | 1014 | GASSRAT | 1054 | QHYGSSPSWT | 1094 |
| C1980-D2 | | | | | | |
| BCMA_EBB- | RASQRVASNYLA | 1015 | GASSRAT | 1055 | QHYDSSPSWT | 1095 |
| C1978-A10 | | | | | | |
| BCMA_EBB- | RASQSLSSNFLA | 1016 | GASNWAT | 1056 | QYYGTSPMYT | 1096 |
| C1978-D4 | | | | | | |
| BCMA_EBB- | RSSQSLLHSNGYNYLD | 1017 | LGSNRAS | 1057 | MQALQTPLT | 1097 |
| C1980-A2 | | | | | | |
| BCMA_EBB- | RASQSVSSSYLA | 1018 | GTSSRAT | 1058 | QHYGNSPPKF | 1098 |
| C1981-C3 | | | | | T | |
| BCMA EBB- | RASQSVASSFLA | 1019 | GASGRAT | 1059 | QHYGGSPRLT | 1099 |
| C1978-G4 | | | | | | |
| A7D12.2 | RASQDVNTAVS | 1020 | SASYRYT | 1060 | QQHYSTPWT | 1100 |
| C11D5.3 | RASESVSVIGAHLIH | 1021 | LASNLET | 1061 | LQSRIFPRT | 1101 |
| C12A3.2 | RASESVTILGSHLIY | 1022 | LASNVQT | 1062 | LQSRTIPRT | 1102 |
| C13F12.1 | RASESVTILGSHLIY | 1023 | LASNVQT | 1063 | LQSRTIPRT | 1103 |

[0318] In certain embodiments, the CAR molecule described herein (e.g., the CAR nucleic acid or the CAR polypeptide) or a BCMA binding domain includes:

(1) one, two, or three light chain (LC) CDRs chosen from one of the following:

[0319] (i) a LC CDR1 of SEQ ID NO: 504, LC CDR2 of SEQ ID NO: 544 and LC CDR3 of SEQ ID NO: 584 of BCMA-4 CAR (139103);

[0320] (ii) a LC CDR1 of SEQ ID NO: 514, LC CDR2 of SEQ ID NO: 554 and LC CDR3 of SEQ ID NO: 594 of BCMA-10 CAR (139109);

[0321] (iii) a LC CDR1 of SEQ ID NO: 516, LC CDR2 of SEQ ID NO: 556 and LC CDR3 of SEQ ID NO: 596 of BCMA-13 CAR (139112); or

[0322] (iv) a LC CDR1 of SEQ ID NO: 518, LC CDR2 of SEQ ID NO: 558 and LC CDR3 of SEQ ID NO: 598 of BCMA-15 CAR (139114), and/or

(2) one, two, or three heavy chain (HC) CDRs from one of the following:

[0323] (i) a HC CDR1 of SEQ ID NO: 384, HC CDR2 of SEQ ID NO: 424 and HC CDR3 of SEQ ID NO: 464 of BCMA-4 CAR (139103);

[0324] (ii) a HC CDR1 of SEQ ID NO: 394, HC CDR2 of SEQ ID NO: 434 and HC CDR3 of SEQ ID NO: 474 of BCMA-10 CAR (139109);

[0325] (iii) a HC CDR1 of SEQ ID NO: 396, HC CDR2 of SEQ ID NO: 436 and HC CDR3 of SEQ ID NO: 476 of BCMA-13 CAR (139112); or

[0326] (iv) a HC CDR1 of SEQ ID NO: 398, HC CDR2 of SEQ ID NO: 438 and HC CDR3 of SEQ ID NO: 478 of BCMA-15 (139114).

[0327] In certain embodiments, the CAR molecule described herein (e.g., the CAR nucleic acid or the CAR polypeptide) includes:

[0328] (1) one, two, or three light chain (LC) CDRs chosen from one of the following:

[0329] (i) a LC CDR1 of SEQ ID NO: 744, LC CDR2 of SEQ ID NO: 784 and LC CDR3 of SEQ ID NO: 824 of BCMA-4 CAR (139103);

[0330] (ii) a LC CDR1 of SEQ ID NO: 754, LC CDR2 of SEQ ID NO: 794 and LC CDR3 of SEQ ID NO: 834 of BCMA-10 CAR (139109);

[0331] (iii) a LC CDR1 of SEQ ID NO: 756, LC CDR2 of SEQ ID NO: 796 and LC CDR3 of SEQ ID NO: 836 of BCMA-13 CAR (139112); or

[0332] (iv) a LC CDR1 of SEQ ID NO: 758, LC CDR2 of SEQ ID NO: 798 and LC CDR3 of SEQ ID NO: 838 of BCMA-15 CAR (139114); and/or

[0333] (2) one, two, or three heavy chain (HC) CDRs chosen from one of the following:

[0334] (i) a HC CDR1 of SEQ ID NO: 624, HC CDR2 of SEQ ID NO: 664 and HC CDR3 of SEQ ID NO: 704 of BCMA-4 CAR (139103);

[0335] (ii) a HC CDR1 of SEQ ID NO: 634, HC CDR2 of SEQ ID NO: 674 and HC CDR3 of SEQ ID NO: 714 of BCMA-10 CAR (139109);

[0336] (iii) a HC CDR1 of SEQ ID NO: 636, HC CDR2 of SEQ ID NO: 676 and HC CDR3 of SEQ ID NO: 716 of BCMA-13 CAR (139112); or

[0337] (iv) a HC CDR1 of SEQ ID NO: 638, HC CDR2 of SEQ ID NO: 678 and HC CDR3 of SEQ ID NO: 718 of BCMA-15 CAR (139114).

[0338] In certain embodiments, the CAR molecule described herein (e.g., the CAR nucleic acid or the CAR polypeptide) includes:

(1) one, two, or three light chain (LC) CDRs chosen from one of the following:

[0339] (i) a LC CDR1 of SEQ ID NO: 984 LC CDR2 of SEQ ID NO: 1024 and LC CDR3 of SEQ ID NO: 1064 of BCMA-4 CAR (139103);

[0340] (ii) a LC CDR1 of SEQ ID NO: 994, LC CDR2 of SEQ ID NO: 1034 and LC CDR3 of SEQ ID NO: 1074 of BCMA-10 CAR (139109);

[0341] (iii) a LC CDR1 of SEQ ID NO: 996, LC CDR2 of SEQ ID NO: 1036 and LC CDR3 of SEQ ID NO: 1076 of BCMA-13 CAR (139112); or

[0342] (iv) a LC CDR1 of SEQ ID NO: 998, LC CDR2 of SEQ ID NO: 1038 and LC CDR3 of SEQ ID NO: 1078 of BCMA-15 CAR (139114); and/or

(2) one, two, or three heavy chain (HC) CDRs chosen from one of the following:

[0343] (i) a HC CDR1 of SEQ ID NO: 864, HC CDR2 of SEQ ID NO: 904 and HC CDR3 of SEQ ID NO: 944 of BCMA-4 CAR (139103);

[0344] (ii) a HC CDR1 of SEQ ID NO: 874, HC CDR2 of SEQ ID NO: 914 and HC CDR3 of SEQ ID NO: 954 of BCMA-10 CAR (139109);

[0345] (iii) a HC CDR1 of SEQ ID NO: 876, HC CDR2 of SEQ ID NO: 916 and HC CDR3 of SEQ ID NO: 956 of BCMA-13 CAR (139112);

[0346] (iv) a HC CDR1 of SEQ ID NO: 878, HC CDR2 of SEQ ID NO: 918 and HC CDR3 of SEQ ID NO: 958 of BCMA-15 CAR (139114).

[0347] In embodiments, anti-BCMA CAR constructs, e.g., human or humanized anti-BCMA CAR constructs, are generated using a method described herein, e.g., as described in Example 4. Exemplary anti-BCMA scFvs include but are not limited to BCMA-1, BCMA-2, BCMA-3, BCMA-4, BCMA-5, BCMA-6, BCMA-7, BCMA-8, BCMA-9, BCMA-10, BCMA-11, BCMA-12, BCMA-13, BCMA-14, and BCMA-15. The sequences of human anti-BCMA scFv fragments (SEQ ID NOS: 39-52), are provided in Table 1 (and the name designations are provided in Table 2).

[0348] In embodiments, full BCMA CAR constructs (e.g., SEQ ID NOs: 99-113) are generated using scFv fragments, e.g., the human scFv fragments (e.g., SEQ ID NOs: 39-52), in combination with additional sequences, such as those shown below.

[0349] It is noted that the scFv fragments described herein, e.g., in Tables 1 and 16 or in SEQ ID NOS: 39-53, 129-149, 263-266, 271 or 273, without a leader sequence (e.g., without the amino acid sequence of SEQ ID NO: 1 or the nucleotide sequence of SEQ ID NO:12), are encompassed by the present invention. In other embodiments, scFv fragments described herein, e.g., in Tables 1 and 16 or in SEQ ID NOS: 39-53, 129-149, 263-266, 271 or 273 with a leader sequence (e.g., without the amino acid sequence of SEQ ID NO: 1 or the nucleotide sequence of SEQ ID NO:12), are also encompassed by the present invention.

leader (amino acid sequence)
(SEQ ID NO: 1)
MALPVTALLLPLALLLHAARP
leader (nucleic acid sequence)
(SEQ ID NO: 12)
ATGGCCCTGCCTGTGACAGCCCTGCTGCTGCCTCTGGCTCTGCTGCTGCA
TGCCGCTAGACCC
CD8 hinge (amino acid sequence)
(SEQ ID NO: 2)
TTTPAPRPPTPAPTIASQPLSLRPEACRPAAGGAVHTRGLDFACD
CD8 hinge (nucleic acid sequence)
(SEQ ID NO: 13)
ACCACGACGCCAGCGCCGCGACCACCAACACCGGCGCCCACCATCGCGTC
GCAGCCCCTGTCCCTGCGCCCAGAGGCGTGCCGGCCAGCGGCGGGGGGCG
CAGTGCACACGAGGGGGCTGGACTTCGCCTGTGAT
CD8 transmembrane (amino acid sequence)
(SEQ ID NO: 6)
IYIWAPLAGTCGVLLLSLVITLYC
CD8 transmembrane (nucleic acid sequence)
(SEQ ID NO: 17)
ATCTACATCTGGGCGCCCTTGGCCGGGACTTGTGGGGTCCTTCTCCTGTC
ACTGGTTATCACCCTTTACTGC
4-1BB Intracellular domain (amino acid sequence)
(SEQ ID NO: 7)
KRGRKKLLYIFKQPFMRPVQTTQEEDGCSCRFPEEEEGGCEL
4-1BB Intracellular domain (nucleic acid sequence)
(SEQ ID NO: 18)
AAACGGGGCAGAAAGAAACTCCTGTATATATTCAAACAACCATTTATGAG
ACCAGTACAAACTACTCAAGAGGAAGATGGCTGTAGCTGCCGATTTCCAG
AAGAAGAAGAAGGAGGATGTGAACTG
CD28 Intracellular domain (amino acid sequence)
(SEQ ID NO: 1104)
RSKRSRLLHSDYMNMTPRRPGPTRKHYQPYAPPRDFAAYRS (SEQ ID
NO: 1104)
CD28 Intracellular domain (nucleotide sequence)
(SEQ ID NO: 1105)
AGGAGTAAGAGGAGCAGGCTCCTGCACAGTGACTACATGAACATGACTCC
CCGCCGCCCCGGGCCCACCCGCAAGCATTACCAGCCCTATGCCCCACCAC
GCGACTTCGCAGCCTATCGCTCC (SEQ ID NO: 1105)
ICOS Intracellular domain (amino acid sequence)
(SEQ ID NO: 1106)
T K K K Y S S S V H D P N G E Y M F M R A V N T A
K K S R L T D V T L (SEQ ID NO: 1106)
ICOS Intracellular domain (nucleotide sequence)
(SEQ ID NO: 1107)
ACAAAAAAGAAGTATTCATCCAGTGTGCACGACCCTAACGGTGAATACAT
GTTCATGAGAGCAGTGAACACAGCCAAAAAATCCAGACTCACAGATGTGA
CCCTA (SEQ ID NO: 1107)
CD3 zeta domain (amino acid sequence)
(SEQ ID NO: 9)
RVKFSRSADAPAYKQGQNQLYNELNLGRREEYDVLDKRRGRDPEMGGKPR
RKNPQEGLYNELQKDKMAEAYSEIGMKGERRRGKGHDGLYQGLSTATKDT
YDALHMQALPPR
CD3 zeta (nucleic acid sequence)
(SEQ ID NO: 20)
AGAGTGAAGTTCAGCAGGAGCGCAGACGCCCCCGCGTACAAGCAGGGCCA
GAACCAGCTCTATAACGAGCTCAATCTAGGACGAAGAGAGGAGTACGATG
TTTTGGACAAGAGACGTGGCCGGGACCCTGAGATGGGGGGAAAGCCGAGA
AGGAAGAACCCTCAGGAAGGCCTGTACAATGAACTGCAGAAAGATAAGAT
GGCGGAGGCCTACAGTGAGATTGGGATGAAAGGCGAGCGCCGGAGGGGCA
AGGGGCACGATGGCCTTTACCAGGGTCTCAGTACAGCCACCAAGGACACC
TACGACGCCCTTCACATGCAGGCCCTGCCCCCTCGC
CD3 zeta domain (amino acid sequence; NCBI
Reference Sequence NM_000734.3)
(SEQ ID NO: 10)
RVKFSRSADAPAYQQGQNQLYNELNLGRREEYDVLDKRRGRDPEMGGKPR
RKNPQEGLYNELQKDKMAEAYSEIGMKGERRRGKGHDGLYQGLSTATKDT
YDALHMQALPPR
CD3 zeta (nucleic acid sequence; NCBI Reference
Sequence NM_000734.3);
(SEQ ID NO: 21)
AGAGTGAAGTTCAGCAGGAGCGCAGACGCCCCCGCGTACCAGCAGGGCCA
GAACCAGCTCTATAACGAGCTCAATCTAGGACGAAGAGAGGAGTACGATG
TTTTGGACAAGAGACGTGGCCGGGACCCTGAGATGGGGGGAAAGCCGAGA
AGGAAGAACCCTCAGGAAGGCCTGTACAATGAACTGCAGAAAGATAAGAT
GGCGGAGGCCTACAGTGAGATTGGGATGAAAGGCGAGCGCCGGAGGGGCA
AGGGGCACGATGGCCTTTACCAGGGTCTCAGTACAGCCACCAAGGACACC
TACGACGCCCTTCACATGCAGGCCCTGCCCCCTCGC
IgG4 Hinge (amino acid sequence)
(SEQ ID NO: 36)
ESKYGPPCPPCPAPEFLGGPSVFLFPPKPKDTLMISRTPEVTCVVVDVSQ
EDPEVQFNVVYVDGVEVHNAKTKPREEQFNSTYRVVSVLTVLHQDWLNGK
EYKCKVSNKGLPSSIEKTISKAKGQPREPQVYTLPPSQEEMTKNQVSLTC
LVKGFYPSDIAVEWESNGQPENNYKTTPPVLDSDGSFFLYSRLTVDKSRW
QEGNVFSCSVMHEALHNHYTQKSLSLSLGKM
IgG4 Hinge (nucleotide sequence)
(SEQ ID NO: 37)
GAGAGCAAGTACGGCCCTCCCTGCCCCCCTTGCCCTGCCCCCGAGTTCCT
GGGCGGACCCAGCGTGTTCCTGTTCCCCCCCAAGCCCAAGGACACCCTGA
TGATCAGCCGGACCCCCGAGGTGACCTGTGTGGTGGTGGACGTGTCCCAG
GAGGACCCCGAGGTCCAGTTCAACTGGTACGTGGACGGCGTGGAGGTGCA
CAACGCCAAGACCAAGCCCCGGGAGGAGCAGTTCAATAGCACCTACCGGG
TGGTGTCCGTGCTGACCGTGCTGCACCAGGACTGGCTGAACGGCAAGGAA
TACAAGTGTAAGGTGTCCAACAAGGGCCTGCCCAGCAGCATCGAGAAAAC
CATCAGCAAGGCCAAGGGCCAGCCTCGGGAGCCCCAGGTGTACACCCTGC
CCCCTAGCCAAGAGGAGATGACCAAGAACCAGGTGTCCCTGACCTGCCTG
GTGAAGGGCTTCTACCCCAGCGACATCGCCGTGGAGTGGGAGAGCAACGG
CCAGCCCGAGAACAACTACAAGACCACCCCCCCTGTGCTGGACAGCGACG
GCAGCTTCTTCCTGTACAGCCGGCTGACCGTGGACAAGAGCCGGTGGCAG
GAGGGCAACGTCTTTAGCTGCTCCGTGATGCACGAGGCCCTGCACAACCA
CTACACCCAGAAGAGCCTGAGCCTGTCCCTGGGCAAGATG

[0350] In embodiments, the CAR scFv fragments are cloned into lentiviral vectors to create a full length CAR construct in a single coding frame, and using a promoter, e.g., EF1 alpha promoter, for expression (SEQ ID NO: 11).

EF1 alpha promoter
CGTGAGGCTCCGGTGCCCGTCAGTGGGCAGAGCGCACATCGCCCACAGTC
CCCGAGAAGTTGGGGGGAGGGGTCGGCAATTGAACCGGTGCCTAGAGAAG
GTGGCGCGGGGTAAACTGGGAAAGTGATGTCGTGTACTGGCTCCGCCTTT
TTCCCGAGGGTGGGGGAGAACCGTATATAAGTGCAGTAGTCGCCGTGAAC
GTTCTTTTTCGCAACGGGTTTGCCGCCAGAACACAGGTAAGTGCCGTGTG
TGGTTCCCGCGGGCCTGGCCTCTTTACGGGTTATGGCCCTTGCGTGCCTT
GAATTACTTCCACCTGGCTGCAGTACGTGATTCTTGATCCCGAGCTTCGG
GTTGGAAGTGGGTGGGAGAGTTCGAGGCCTTGCGCTTAAGGAGCCCCTTC
GCCTCGTGCTTGAGTTGAGGCCTGGCCTGGGCGCTGGGGCCGCCGCGTGC
GAATCTGGTGGCACCTTCGCGCCTGTCTCGCTGCTTTCGATAAGTCTCTA
GCCATTTAAAATTTTTGATGACCTGCTGCGACGCTTTTTTTCTGGCAAGA
TAGTCTTGTAAATGCGGGCCAAGATCTGCACACTGGTATTTCGGTTTTTG
GGGCCGCGGGCGGCGACGGGGCCCGTGCGTCCCAGCGCACATGTTCGGCG
AGGCGGGGCCTGCGAGCGCGGCCACCGAGAATCGGACGGGGGTAGTCTCA
AGCTGGCCGGCCTGCTCTGGTGCCTGGCCTCGCGCCGCCGTGTATCGCCC
CGCCCTGGGCGGCAAGGCTGGCCCGGTCGGCACCAGTTGCGTGAGCGGAA
AGATGGCCGCTTCCCGGCCCTGCTGCAGGGAGCTCAAAATGGAGGACGCG
GCGCTCGGGAGAGCGGGCGGGTGAGTCACCCACACAAAGGAAAAGGGCCT
TTCCGTCCTCAGCCGTCGCTTCATGTGACTCCACGGAGTACCGGGCGCCG
TCCAGGCACCTCGATTAGTTCTCGAGCTTTTGGAGTACGTCGTCTTTAGG
TTGGGGGGAGGGGTTTTATGCGATGGAGTTTCCCCACACTGAGTGGGTGG
AGACTGAAGTTAGGCCAGCTTGGCACTTGATGTAATTCTCCTTGGAATTT
GCCCTTTTTGAGTTTGGATCTTGGTTCATTCTCAAGCCTCAGACAGTGGT
TCAAAGTTTTTTTCTTCCATTTCAGGTGTCGTGA (SEQ ID NO:
11).
Gly/Ser (SEQ ID NO: 25)
GGGGS
Gly/Ser (SEQ ID NO: 26): This sequence may
encompass 1-6 “Gly Gly Gly Gly Ser” repeating
units
GGGGSGGGGS GGGGSGGGGS GGGGSGGGGS
Gly/Ser (SEQ ID NO: 27)
GGGGSGGGGS GGGGSGGGGS
Gly/Ser (SEQ ID NO: 28)
GGGGSGGGGS GGGGS
Gly/Ser (SEQ ID NO: 29)
GGGS
PolyA: (A)₅₀₀₀ (SEQ ID NO: 30)
PolyA: (T)₁₀₀ (SEQ ID NO: 31)
PolyA: (T)₅₀₀₀ (SEQ ID NO: 32)
PolyA: (A)₅₀₀₀ (SEQ ID NO: 33)
PolyA: (A)₄₀₀ (SEQ ID NO: 34)
PolyA: (A)₂₀₀₀ (SEQ ID NO: 35)
Gly/Ser (SEQ ID NO:38): This sequence may
encompass 1-10 “Gly Gly Gly Ser” repeating units
GGGSGGGSGG GSGGGSGGGS GGGSGGGSGG GSGGGSGGGS

[0351] The amino acid and nucleic acid sequences of exemplary BCMA scFv domains and exemplary BCMA CAR molecules are provided in Table 1.

[0352] Table 2 below designates the nicknames for the BCMA CAR constructs with respect to the DNA ID number, also listed in Table 1.

TABLE 2
CAR construct IDs

| Nickname | Novartis ID | DNA2.0 ID |
|---|---|---|
| BCMA-1 | ER95-03VA | 139100 |
| BCMA-2 | UR96-08PA | 139101 |
| BCMA-3 | KR98-03KA | 139102 |
| BCMA-4 | JF32-78IB | 139103 |
| BCMA-5 | AR99-08FA | 139104 |
| BCMA-6 | ZF34-73CB | 139105 |
| BCMA-7 | QR91-12ZA | 139106 |
| BCMA-8 | GR92-17UA | 139107 |
| BCMA-9 | OG62-93QB | 139108 |
| BCMA-10 | EG63-98LB | 139109 |
| BCMA-11 | UG65-93FB | 139110 |
| BCMA-12 | HU13-58ZB | 139111 |
| BCMA-13 | KG66-98AB | 139112 |
| BCMA-14 | HJ64-62PB | 139113 |
| BCMA-15 | PY43-48LB | 139114 |

TABLE 1
Amino Acid and Nucleic Acid Sequences of exemplary anti-BCMA scFv
domains and BCMA CAR molecules
The amino acid sequences variable heavy chain and variable light chain sequences
for each scFv is also provided. Table 2 lists names and CAR construct
IDs for several BCMA CARs.

| | | |
|---|---|---|
| | SEQ | |
| Name/ | ID | |
| Description | NO: | Sequence |

139109

| | | |
|---|---|---|
| 139109- aa | 49 | EVQLVESGGGLVQPGGSLRLSCAVSGFALSNHGMSWVRRAPGKGLEWVSGIVY |
| ScFv domain | | SGSTYYAASVKGRFTISRDNSRNTLYLQMNSLRPEDTAIYYCSAHGGESDVWG |
| | | QGTTVTVSSASGGGGSGGRASGGGGSDIQLTQSPSSLSASVGDRVTITCRASQ |
| | | SISSYLNWYQQKPGKAPKLLIYAASSLQSGVPSRFSGSGSGTDFTLTISSLQP |
| | | EDFATYYCQQSYSTPYTFGQGTKVEIK |
| 139109- nt | 64 | GAAGTGCAATTGGTGGAATCAGGGGGAGGACTTGTGCAGCCTGGAGGATCGCT |
| ScFv domain | | GAGACTGTCATGTGCCGTGTCCGGCTTTGCCCTGTCCAACCACGGGATGTCCT |
| | | GGGTCCGCCGCGCGCCTGGAAAGGGCCTCGAATGGGTGTCGGGTATTGTGTAC |
| | | AGCGGTAGCACCTACTATGCCGCATCCGTGAAGGGGAGATTCACCATCAGCCG |
| | | GGACAACTCCAGGAACACTCTGTACCTCCAAATGAATTCGCTGAGGCCAGAGG |
| | | ACACTGCCATCTACTACTGCTCCGCGCATGGCGGAGAGTCCGACGTCTGGGGA |
| | | CAGGGGACCACCGTGACCGTGTCTAGCGCGTCCGGCGGAGGCGGCAGCGGGGG |
| | | TCGGGCATCAGGGGGCGGCGGATCGGACATCCAGCTCACCCAGTCCCCGAGCT |
| | | CGCTGTCCGCCTCCGTGGGAGATCGGGTCACCATCACGTGCCGCGCCAGCCAG |
| | | TCGATTTCCTCCTACCTGAACTGGTACCAACAGAAGCCCGGAAAAGCCCCGAA |
| | | GCTTCTCATCTACGCCGCCTCGAGCCTGCAGTCAGGAGTGCCCTCACGGTTCT |
| | | CCGGCTCCGGTTCCGGTACTGATTTCACCCTGACCATTTCCTCCCTGCAACCG |
| | | GAGGACTTCGCTACTTACTACTGCCAGCAGTCGTACTCCACCCCCTACACTTT |
| | | CGGACAAGGCACCAAGGTCGAAATCAAG |
| 139109- aa | 79 | EVQLVESGGGLVQPGGSLRLSCAVSGFALSNHGMSWVRRAPGKGLEWVSGIVY |
| VH | | SGSTYYAASVKGRFTISRDNSRNTLYLQMNSLRPEDTAIYYCSAHGGESDVWG |
| | | QGTTVTVSS |
| 139109- aa | 94 | DIQLTQSPSSLSASVGDRVTITCRASQSISSYLNWYQQKPGKAPKLLIYAASS |
| VL | | LQSGVPSRFSGSGSGTDFTLTISSLQPEDFATYYCQQSYSTPYTFGQGTKVEI |
| | | K |
| 139109- aa | 109 | MALPVTALLLPLALLLHAARPEVQLVESGGGLVQPGGSLRLSCAVSGFALSNH |
| Full CAR | | GMSWVRRAPGKGLEWVSGIVYSGSTYYAASVKGRFTISRDNSRNTLYLQMNSL |
| | | RPEDTAIYYCSAHGGESDVWGQGTTVTVSSASGGGGSGGRASGGGGSDIQLTQ |
| | | SPSSLSASVGDRVTITCRASQSISSYLNWYQQKPGKAPKLLIYAASSLQSGVP |
| | | SRFSGSGSGTDFTLTISSLQPEDFATYYCQQSYSTPYTFGQGTKVEIKTTTPA |
| | | PRPPTPAPTIASQPLSLRPEACRPAAGGAVHTRGLDFACDIYIWAPLAGTCGV |
| | | LLLSLVITLYCKRGRKKLLYIFKQPFMRPVQTTQEEDGCSCRFPEEEEGGCEL |
| | | RVKFSRSADAPAYKQGQNQLYNELNLGRREEYDVLDKRRGRDPEMGGKPRRKN |
| | | PQEGLYNELQKDKMAEAYSEIGMKGERRRGKGHDGLYQGLSTATKDTYDALHM |
| | | QALPPR |
| 139109- nt | 124 | ATGGCCCTCCCTGTCACCGCCCTGCTGCTTCCGCTGGCTCTTCTGCTCCACGC |
| Full CAR | | CGCTCGGCCCGAAGTGCAATTGGTGGAATCAGGGGGAGGACTTGTGCAGCCTG |
| | | GAGGATCGCTGAGACTGTCATGTGCCGTGTCCGGCTTTGCCCTGTCCAACCAC |
| | | GGGATGTCCTGGGTCCGCCGCGCGCCTGGAAAGGGCCTCGAATGGGTGTCGGG |
| | | TATTGTGTACAGCGGTAGCACCTACTATGCCGCATCCGTGAAGGGGAGATTCA |
| | | CCATCAGCCGGGACAACTCCAGGAACACTCTGTACCTCCAAATGAATTCGCTG |
| | | AGGCCAGAGGACACTGCCATCTACTACTGCTCCGCGCATGGCGGAGAGTCCGA |
| | | CGTCTGGGGACAGGGGACCACCGTGACCGTGTCTAGCGCGTCCGGCGGAGGCG |
| | | GCAGCGGGGGTCGGGCATCAGGGGGCGGCGGATCGGACATCCAGCTCACCCAG |
| | | TCCCCGAGCTCGCTGTCCGCCTCCGTGGGAGATCGGGTCACCATCACGTGCCG |
| | | CGCCAGCCAGTCGATTTCCTCCTACCTGAACTGGTACCAACAGAAGCCCGGAA |
| | | AAGCCCCGAAGCTTCTCATCTACGCCGCCTCGAGCCTGCAGTCAGGAGTGCCC |
| | | TCACGGTTCTCCGGCTCCGGTTCCGGTACTGATTTCACCCTGACCATTTCCTC |
| | | CCTGCAACCGGAGGACTTCGCTACTTACTACTGCCAGCAGTCGTACTCCACCC |
| | | CCTACACTTTCGGACAAGGCACCAAGGTCGAAATCAAGACCACTACCCCAGCA |
| | | CCGAGGCCACCCACCCCGGCTCCTACCATCGCCTCCCAGCCTCTGTCCCTGCG |
| | | TCCGGAGGCATGTAGACCCGCAGCTGGTGGGGCCGTGCATACCCGGGGTCTTG |
| | | ACTTCGCCTGCGATATCTACATTTGGGCCCCTCTGGCTGGTACTTGCGGGGTC |
| | | CTGCTGCTTTCACTCGTGATCACTCTTTACTGTAAGCGCGGTCGGAAGAAGCT |
| | | GCTGTACATCTTTAAGCAACCCTTCATGAGGCCTGTGCAGACTACTCAAGAGG |
| | | AGGACGGCTGTTCATGCCGGTTCCCAGAGGAGGAGGAAGGCGGCTGCGAACTG |
| | | CGCGTGAAATTCAGCCGCAGCGCAGATGCTCCAGCCTACAAGCAGGGGCAGAA |
| | | CCAGCTCTACAACGAACTCAATCTTGGTCGGAGAGAGGAGTACGACGTGCTGG |
| | | ACAAGCGGAGAGGACGGGACCCAGAAATGGGCGGGAAGCCGCGCAGAAAGAAT |
| | | CCCCAAGAGGGCCTGTACAACGAGCTCCAAAAGGATAAGATGGCAGAAGCCTA |
| | | TAGCGAGATTGGTATGAAAGGGGAACGCAGAAGAGGCAAAGGCCACGACGGAC |
| | | TGTACCAGGGACTCAGCACCGCCACCAAGGACACCTATGACGCTCTTCACATG |
| | | CAGGCCCTGCCGCCTCGG |

139103

| | | |
|---|---|---|
| 139103- aa | 39 | QVQLVESGGGLVQPGRSLRLSCAASGFTFSNYAMSWVRQAPGKGLGWVSGISR |
| ScFv domain | | SGENTYYADSVKGRFTISRDNSKNTLYLQMNSLRDEDTAVYYCARSPAHYYGG |
| | | MDVWGQGTTVTVSSASGGGGSGGRASGGGGSDIVLTQSPGTLSLSPGERATLS |
| | | CRASQSISSSFLAWYQQKPGQAPRLLIYGASRRATGIPDRFSGSGSGTDFTLT |
| | | ISRLEPEDSAVYYCQQYHSSPSWTFGQGTKLEIK |
| 139103- nt | 54 | CAAGTGCAACTCGTGGAATCTGGTGGAGGACTCGTGCAACCCGGAAGATCGCT |
| ScFv domain | | TAGACTGTCGTGTGCCGCCAGCGGGTTCACTTTCTCGAACTACGCGATGTCCT |
| | | GGGTCCGCCAGGCACCCGGAAAGGGACTCGGTTGGGTGTCCGGCATTTCCCGG |
| | | TCCGGCGAAAATACCTACTACGCCGACTCCGTGAAGGGCCGCTTCACCATCTC |
| | | AAGGGACAACAGCAAAAACACCCTGTACTTGCAAATGAACTCCCTGCGGGATG |
| | | AAGATACAGCCGTGTACTATTGCGCCCGGTCGCCTGCCCATTACTACGGCGGA |
| | | ATGGACGTCTGGGGACAGGGAACCACTGTGACTGTCAGCAGCGCGTCGGGTGG |
| | | CGGCGGCTCAGGGGGTCGGGCCTCCGGGGGGGGAGGGTCCGACATCGTGCTGA |
| | | CCCAGTCCCCGGGAACCCTGAGCCTGAGCCCGGGAGAGCGCGCGACCCTGTCA |
| | | TGCCGGGCATCCCAGAGCATTAGCTCCTCCTTTCTCGCCTGGTATCAGCAGAA |
| | | GCCCGGACAGGCCCCGAGGCTGCTGATCTACGGCGCTAGCAGAAGGGCTACCG |
| | | GAATCCCAGACCGGTTCTCCGGCTCCGGTTCCGGGACCGATTTCACCCTTACT |
| | | ATCTCGCGCCTGGAACCTGAGGACTCCGCCGTCTACTACTGCCAGCAGTACCA |
| | | CTCATCCCCGTCGTGGACGTTCGGACAGGGCACCAAGCTGGAGATTAAG |
| 139103- aa | 69 | QVQLVESGGGLVQPGRSLRLSCAASGFTFSNYAMSWVRQAPGKGLGWVSGISR |
| VH | | SGENTYYADSVKGRFTISRDNSKNTLYLQMNSLRDEDTAVYYCARSPAHYYGG |
| | | MDVWGQGTTVTVSS |
| 139103- aa | 84 | DIVLTQSPGTLSLSPGERATLSCRASQSISSSFLAWYQQKPGQAPRLLIYGAS |
| VL | | RRATGIPDRFSGSGSGTDFTLTISRLEPEDSAVYYCQQYHSSPSWTFGQGTKL |
| | | EIK |
| 139103- aa | 99 | MALPVTALLLPLALLLHAARPQVQLVESGGGLVQPGRSLRLSCAASGFTFSNY |
| Full CAR | | AMSWVRQAPGKGLGWVSGISRSGENTYYADSVKGRFTISRDNSKNTLYLQMNS |
| | | LRDEDTAVYYCARSPAHYYGGMDVWGQGTTVTVSSASGGGGSGGRASGGGGSD |
| | | IVLTQSPGTLSLSPGERATLSCRASQSISSSFLAWYQQKPGQAPRLLIYGASR |
| | | RATGIPDRFSGSGSGTDFTLTISRLEPEDSAVYYCQQYHSSPSWTFGQGTKLE |
| | | IKTTTPAPRPPTPAPTIASQPLSLRPEACRPAAGGAVHTRGLDFACDIYIWAP |
| | | LAGTCGVLLLSLVITLYCKRGRKKLLYIFKQPFMRPVQTTQEEDGCSCRFPEE |
| | | EEGGCELRVKFSRSADAPAYKQGQNQLYNELNLGRREEYDVLDKRRGRDPEMG |
| | | GKPRRKNPQEGLYNELQKDKMAEAYSEIGMKGERRRGKGHDGLYQGLSTATKD |
| | | TYDALHMQALPPR |
| 139103- nt | 114 | ATGGCCCTCCCTGTCACCGCCCTGCTGCTTCCGCTGGCTCTTCTGCTCCACGC |
| Full CAR | | CGCTCGGCCCCAAGTGCAACTCGTGGAATCTGGTGGAGGACTCGTGCAACCCG |
| | | GAAGATCGCTTAGACTGTCGTGTGCCGCCAGCGGGTTCACTTTCTCGAACTAC |
| | | GCGATGTCCTGGGTCCGCCAGGCACCCGGAAAGGGACTCGGTTGGGTGTCCGG |
| | | CATTTCCCGGTCCGGCGAAAATACCTACTACGCCGACTCCGTGAAGGGCCGCT |
| | | TCACCATCTCAAGGGACAACAGCAAAAACACCCTGTACTTGCAAATGAACTCC |
| | | CTGCGGGATGAAGATACAGCCGTGTACTATTGCGCCCGGTCGCCTGCCCATTA |
| | | CTACGGCGGAATGGACGTCTGGGGACAGGGAACCACTGTGACTGTCAGCAGCG |
| | | CGTCGGGTGGCGGCGGCTCAGGGGGTCGGGCCTCCGGGGGGGGAGGGTCCGAC |
| | | ATCGTGCTGACCCAGTCCCCGGGAACCCTGAGCCTGAGCCCGGGAGAGCGCGC |
| | | GACCCTGTCATGCCGGGCATCCCAGAGCATTAGCTCCTCCTTTCTCGCCTGGT |
| | | ATCAGCAGAAGCCCGGACAGGCCCCGAGGCTGCTGATCTACGGCGCTAGCAGA |
| | | AGGGCTACCGGAATCCCAGACCGGTTCTCCGGCTCCGGTTCCGGGACCGATTT |
| | | CACCCTTACTATCTCGCGCCTGGAACCTGAGGACTCCGCCGTCTACTACTGCC |
| | | AGCAGTACCACTCATCCCCGTCGTGGACGTTCGGACAGGGCACCAAGCTGGAG |
| | | ATTAAGACCACTACCCCAGCACCGAGGCCACCCACCCCGGCTCCTACCATCGC |
| | | CTCCCAGCCTCTGTCCCTGCGTCCGGAGGCATGTAGACCCGCAGCTGGTGGGG |
| | | CCGTGCATACCCGGGGTCTTGACTTCGCCTGCGATATCTACATTTGGGCCCCT |
| | | CTGGCTGGTACTTGCGGGGTCCTGCTGCTTTCACTCGTGATCACTCTTTACTG |
| | | TAAGCGCGGTCGGAAGAAGCTGCTGTACATCTTTAAGCAACCCTTCATGAGGC |
| | | CTGTGCAGACTACTCAAGAGGAGGACGGCTGTTCATGCCGGTTCCCAGAGGAG |
| | | GAGGAAGGCGGCTGCGAACTGCGCGTGAAATTCAGCCGCAGCGCAGATGCTCC |
| | | AGCCTACAAGCAGGGGCAGAACCAGCTCTACAACGAACTCAATCTTGGTCGGA |
| | | GAGAGGAGTACGACGTGCTGGACAAGCGGAGAGGACGGGACCCAGAAATGGGC |
| | | GGGAAGCCGCGCAGAAAGAATCCCCAAGAGGGCCTGTACAACGAGCTCCAAAA |
| | | GGATAAGATGGCAGAAGCCTATAGCGAGATTGGTATGAAAGGGGAACGCAGAA |
| | | GAGGCAAAGGCCACGACGGACTGTACCAGGGACTCAGCACCGCCACCAAGGAC |
| | | ACCTATGACGCTCTTCACATGCAGGCCCTGCCGCCTCGG |

139105

| | | |
|---|---|---|
| 139105- aa | 40 | QVQLVESGGGLVQPGRSLRLSCAASGFTFDDYAMHWVRQAPGKGLEWVSGISW |
| ScFv domain | | NSGSIGYADSVKGRFTISRDNAKNSLYLQMNSLRAEDTALYYCSVHSFLAYWG |
| | | QGTLVTVSSASGGGGSGGRASGGGGSDIVMTQTPLSLPVTPGEPASISCRSSQ |
| | | SLLHSNGYNYLDWYLQKPGQSPQLLIYLGSNRASGVPDRFSGSGSGTDFTLKI |
| | | SRVEAEDVGVYYCMQALQTPYTFGQGTKVEIK |
| 139105- nt | 55 | CAAGTGCAACTCGTCGAATCCGGTGGAGGTCTGGTCCAACCTGGTAGAAGCCT |
| ScFv domain | | GAGACTGTCGTGTGCGGCCAGCGGATTCACCTTTGATGACTATGCTATGCACT |
| | | GGGTGCGGCAGGCCCCAGGAAAGGGCCTGGAATGGGTGTCGGGAATTAGCTGG |
| | | AACTCCGGGTCCATTGGCTACGCCGACTCCGTGAAGGGCCGCTTCACCATCTC |
| | | CCGCGACAACGCAAAGAACTCCCTGTACTTGCAAATGAACTCGCTCAGGGCTG |
| | | AGGATACCGCGCTGTACTACTGCTCCGTGCATTCCTTCCTGGCCTACTGGGGA |
| | | CAGGGAACTCTGGTCACCGTGTCGAGCGCCTCCGGCGGCGGGGGCTCGGGTGG |
| | | ACGGGCCTCGGGCGGAGGGGGGTCCGACATCGTGATGACCCAGACCCCGCTGA |
| | | GCTTGCCCGTGACTCCCGGAGAGCCTGCATCCATCTCCTGCCGGTCATCCCAG |
| | | TCCCTTCTCCACTCCAACGGATACAACTACCTCGACTGGTACCTCCAGAAGCC |
| | | GGGACAGAGCCCTCAGCTTCTGATCTACCTGGGGTCAAATAGAGCCTCAGGAG |
| | | TGCCGGATCGGTTCAGCGGATCTGGTTCGGGAACTGATTTCACTCTGAAGATT |
| | | TCCCGCGTGGAAGCCGAGGACGTGGGCGTCTACTACTGTATGCAGGCGCTGCA |
| | | GACCCCCTATACCTTCGGCCAAGGGACGAAAGTGGAGATCAAG |
| 139105- aa | 70 | QVQLVESGGGLVQPGRSLRLSCAASGFTFDDYAMHWVRQAPGKGLEWVSGISW |
| VH | | NSGSIGYADSVKGRFTISRDNAKNSLYLQMNSLRAEDTALYYCSVHSFLAYWG |
| | | QGTLVTVSS |
| 139105- aa | 85 | DIVMTQTPLSLPVTPGEPASISCRSSQSLLHSNGYNYLDWYLQKPGQSPQLLI |
| VL | | YLGSNRASGVPDRFSGSGSGTDFTLKISRVEAEDVGVYYCMQALQTPYTFGQG |
| | | TKVEIK |
| 139105- aa | 100 | MALPVTALLLPLALLLHAARPQVQLVESGGGLVQPGRSLRLSCAASGFTFDDY |
| Full CAR | | AMHWVRQAPGKGLEWVSGISWNSGSIGYADSVKGRFTISRDNAKNSLYLQMNS |
| | | LRAEDTALYYCSVHSFLAYWGQGTLVTVSSASGGGGSGGRASGGGGSDIVMTQ |
| | | TPLSLPVTPGEPASISCRSSQSLLHSNGYNYLDWYLQKPGQSPQLLIYLGSNR |
| | | ASGVPDRFSGSGSGTDFTLKISRVEAEDVGVYYCMQALQTPYTFGQGTKVEIK |
| | | TTTPAPRPPTPAPTIASQPLSLRPEACRPAAGGAVHTRGLDFACDIYIWAPLA |
| | | GTCGVLLLSLVITLYCKRGRKKLLYIFKQPFMRPVQTTQEEDGCSCRFPEEEE |
| | | GGCELRVKFSRSADAPAYKQGQNQLYNELNLGRREEYDVLDKRRGRDPEMGGK |
| | | PRRKNPQEGLYNELQKDKMAEAYSEIGMKGERRRGKGHDGLYQGLSTATKDTY |
| | | DALHMQALPPR |
| 139105- nt | 115 | ATGGCCCTCCCTGTCACCGCCCTGCTGCTTCCGCTGGCTCTTCTGCTCCACGC |
| Full CAR | | CGCTCGGCCCCAAGTGCAACTCGTCGAATCCGGTGGAGGTCTGGTCCAACCTG |
| | | GTAGAAGCCTGAGACTGTCGTGTGCGGCCAGCGGATTCACCTTTGATGACTAT |
| | | GCTATGCACTGGGTGCGGCAGGCCCCAGGAAAGGGCCTGGAATGGGTGTCGGG |
| | | AATTAGCTGGAACTCCGGGTCCATTGGCTACGCCGACTCCGTGAAGGGCCGCT |
| | | TCACCATCTCCCGCGACAACGCAAAGAACTCCCTGTACTTGCAAATGAACTCG |
| | | CTCAGGGCTGAGGATACCGCGCTGTACTACTGCTCCGTGCATTCCTTCCTGGC |
| | | CTACTGGGGACAGGGAACTCTGGTCACCGTGTCGAGCGCCTCCGGCGGCGGGG |
| | | GCTCGGGTGGACGGGCCTCGGGCGGAGGGGGGTCCGACATCGTGATGACCCAG |
| | | ACCCCGCTGAGCTTGCCCGTGACTCCCGGAGAGCCTGCATCCATCTCCTGCCG |
| | | GTCATCCCAGTCCCTTCTCCACTCCAACGGATACAACTACCTCGACTGGTACC |
| | | TCCAGAAGCCGGGACAGAGCCCTCAGCTTCTGATCTACCTGGGGTCAAATAGA |
| | | GCCTCAGGAGTGCCGGATCGGTTCAGCGGATCTGGTTCGGGAACTGATTTCAC |
| | | TCTGAAGATTTCCCGCGTGGAAGCCGAGGACGTGGGCGTCTACTACTGTATGC |
| | | AGGCGCTGCAGACCCCCTATACCTTCGGCCAAGGGACGAAAGTGGAGATCAAG |
| | | ACCACTACCCCAGCACCGAGGCCACCCACCCCGGCTCCTACCATCGCCTCCCA |
| | | GCCTCTGTCCCTGCGTCCGGAGGCATGTAGACCCGCAGCTGGTGGGGCCGTGC |
| | | ATACCCGGGGTCTTGACTTCGCCTGCGATATCTACATTTGGGCCCCTCTGGCT |
| | | GGTACTTGCGGGGTCCTGCTGCTTTCACTCGTGATCACTCTTTACTGTAAGCG |
| | | CGGTCGGAAGAAGCTGCTGTACATCTTTAAGCAACCCTTCATGAGGCCTGTGC |
| | | AGACTACTCAAGAGGAGGACGGCTGTTCATGCCGGTTCCCAGAGGAGGAGGAA |
| | | GGCGGCTGCGAACTGCGCGTGAAATTCAGCCGCAGCGCAGATGCTCCAGCCTA |
| | | CAAGCAGGGGCAGAACCAGCTCTACAACGAACTCAATCTTGGTCGGAGAGAGG |
| | | AGTACGACGTGCTGGACAAGCGGAGAGGACGGGACCCAGAAATGGGCGGGAAG |
| | | CCGCGCAGAAAGAATCCCCAAGAGGGCCTGTACAACGAGCTCCAAAAGGATAA |
| | | GATGGCAGAAGCCTATAGCGAGATTGGTATGAAAGGGGAACGCAGAAGAGGCA |
| | | AAGGCCACGACGGACTGTACCAGGGACTCAGCACCGCCACCAAGGACACCTAT |
| | | GACGCTCTTCACATGCAGGCCCTGCCGCCTCGG |

139111

| | | |
|---|---|---|
| 139111- aa | 41 | EVQLLESGGGLVQPGGSLRLSCAVSGFALSNHGMSWVRRAPGKGLEWVSGIVY |
| ScFv domain | | SGSTYYAASVKGRFTISRDNSRNTLYLQMNSLRPEDTAIYYCSAHGGESDVWG |
| | | QGTTVTVSSASGGGGSGGRASGGGGSDIVMTQTPLSLSVTPGQPASISCKSSQ |
| | | SLLRNDGKTPLYWYLQKAGQPPQLLIYEVSNRFSGVPDRFSGSGSGTDFTLKI |
| | | SRVEAEDVGAYYCMQNIQFPSFGGGTKLEIK |
| 139111- nt | 56 | GAAGTGCAATTGTTGGAATCTGGAGGAGGACTTGTGCAGCCTGGAGGATCACT |
| ScFv domain | | GAGACTTTCGTGTGCGGTGTCAGGCTTCGCCCTGAGCAACCACGGCATGAGCT |
| | | GGGTGCGGAGAGCCCCGGGGAAGGGTCTGGAATGGGTGTCCGGGATCGTCTAC |
| | | TCCGGTTCAACTTACTACGCCGCAAGCGTGAAGGGTCGCTTCACCATTTCCCG |
| | | CGATAACTCCCGGAACACCCTGTACCTCCAAATGAACTCCCTGCGGCCCGAGG |
| | | ACACCGCCATCTACTACTGTTCCGCGCATGGAGGAGAGTCCGATGTCTGGGGA |
| | | CAGGGCACTACCGTGACCGTGTCGAGCGCCTCGGGGGGAGGAGGCTCCGGCGG |
| | | TCGCGCCTCCGGGGGGGGTGGCAGCGACATTGTGATGACGCAGACTCCACTCT |
| | | CGCTGTCCGTGACCCCGGGACAGCCCGCGTCCATCTCGTGCAAGAGCTCCCAG |
| | | AGCCTGCTGAGGAACGACGGAAAGACTCCTCTGTATTGGTACCTCCAGAAGGC |
| | | TGGACAGCCCCCGCAACTGCTCATCTACGAAGTGTCAAATCGCTTCTCCGGGG |
| | | TGCCGGATCGGTTTTCCGGCTCGGGATCGGGCACCGACTTCACCCTGAAAATC |
| | | TCCAGGGTCGAGGCCGAGGACGTGGGAGCCTACTACTGCATGCAAAACATCCA |
| | | GTTCCCTTCCTTCGGCGGCGGCACAAAGCTGGAGATTAAG |
| 139111- aa | 71 | EVQLLESGGGLVQPGGSLRLSCAVSGFALSNHGMSWVRRAPGKGLEWVSGIVY |
| VH | | SGSTYYAASVKGRFTISRDNSRNTLYLQMNSLRPEDTAIYYCSAHGGESDVWG |
| | | QGTTVTVSS |
| 139111- aa | 86 | DIVMTQTPLSLSVTPGQPASISCKSSQSLLRNDGKTPLYWYLQKAGQPPQLLI |
| VL | | YEVSNRFSGVPDRFSGSGSGTDFTLKISRVEAEDVGAYYCMQNIQFPSFGGGT |
| | | KLEIK |
| 139111- aa | 101 | MALPVTALLLPLALLLHAARPEVQLLESGGGLVQPGGSLRLSCAVSGFALSNH |
| Full CAR | | GMSWVRRAPGKGLEWVSGIVYSGSTYYAASVKGRFTISRDNSRNTLYLQMNSL |
| | | RPEDTAIYYCSAHGGESDVWGQGTTVTVSSASGGGGSGGRASGGGGSDIVMTQ |
| | | TPLSLSVTPGQPASISCKSSQSLLRNDGKTPLYWYLQKAGQPPQLLIYEVSNR |
| | | FSGVPDRFSGSGSGTDFTLKISRVEAEDVGAYYCMQNIQFPSFGGGTKLEIKT |
| | | TTPAPRPPTPAPTIASQPLSLRPEACRPAAGGAVHTRGLDFACDIYIWAPLAG |
| | | TCGVLLLSLVITLYCKRGRKKLLYIFKQPFMRPVQTTQEEDGCSCRFPEEEEG |
| | | GCELRVKFSRSADAPAYKQGQNQLYNELNLGRREEYDVLDKRRGRDPEMGGKP |
| | | RRKNPQEGLYNELQKDKMAEAYSEIGMKGERRRGKGHDGLYQGLSTATKDTYD |
| | | ALHMQALPPR |
| 139111- nt | 116 | ATGGCCCTCCCTGTCACCGCCCTGCTGCTTCCGCTGGCTCTTCTGCTCCACGC |
| Full CAR | | CGCTCGGCCCGAAGTGCAATTGTTGGAATCTGGAGGAGGACTTGTGCAGCCTG |
| | | GAGGATCACTGAGACTTTCGTGTGCGGTGTCAGGCTTCGCCCTGAGCAACCAC |
| | | GGCATGAGCTGGGTGCGGAGAGCCCCGGGGAAGGGTCTGGAATGGGTGTCCGG |
| | | GATCGTCTACTCCGGTTCAACTTACTACGCCGCAAGCGTGAAGGGTCGCTTCA |
| | | CCATTTCCCGCGATAACTCCCGGAACACCCTGTACCTCCAAATGAACTCCCTG |
| | | CGGCCCGAGGACACCGCCATCTACTACTGTTCCGCGCATGGAGGAGAGTCCGA |
| | | TGTCTGGGGACAGGGCACTACCGTGACCGTGTCGAGCGCCTCGGGGGGAGGAG |
| | | GCTCCGGCGGTCGCGCCTCCGGGGGGGGTGGCAGCGACATTGTGATGACGCAG |
| | | ACTCCACTCTCGCTGTCCGTGACCCCGGGACAGCCCGCGTCCATCTCGTGCAA |
| | | GAGCTCCCAGAGCCTGCTGAGGAACGACGGAAAGACTCCTCTGTATTGGTACC |
| | | TCCAGAAGGCTGGACAGCCCCCGCAACTGCTCATCTACGAAGTGTCAAATCGC |
| | | TTCTCCGGGGTGCCGGATCGGTTTTCCGGCTCGGGATCGGGCACCGACTTCAC |
| | | CCTGAAAATCTCCAGGGTCGAGGCCGAGGACGTGGGAGCCTACTACTGCATGC |
| | | AAAACATCCAGTTCCCTTCCTTCGGCGGCGGCACAAAGCTGGAGATTAAGACC |
| | | ACTACCCCAGCACCGAGGCCACCCACCCCGGCTCCTACCATCGCCTCCCAGCC |
| | | TCTGTCCCTGCGTCCGGAGGCATGTAGACCCGCAGCTGGTGGGGCCGTGCATA |
| | | CCCGGGGTCTTGACTTCGCCTGCGATATCTACATTTGGGCCCCTCTGGCTGGT |
| | | ACTTGCGGGGTCCTGCTGCTTTCACTCGTGATCACTCTTTACTGTAAGCGCGG |
| | | TCGGAAGAAGCTGCTGTACATCTTTAAGCAACCCTTCATGAGGCCTGTGCAGA |
| | | CTACTCAAGAGGAGGACGGCTGTTCATGCCGGTTCCCAGAGGAGGAGGAAGGC |
| | | GGCTGCGAACTGCGCGTGAAATTCAGCCGCAGCGCAGATGCTCCAGCCTACAA |
| | | GCAGGGGCAGAACCAGCTCTACAACGAACTCAATCTTGGTCGGAGAGAGGAGT |
| | | ACGACGTGCTGGACAAGCGGAGAGGACGGGACCCAGAAATGGGCGGGAAGCCG |
| | | CGCAGAAAGAATCCCCAAGAGGGCCTGTACAACGAGCTCCAAAAGGATAAGAT |
| | | GGCAGAAGCCTATAGCGAGATTGGTATGAAAGGGGAACGCAGAAGAGGCAAAG |
| | | GCCACGACGGACTGTACCAGGGACTCAGCACCGCCACCAAGGACACCTATGAC |
| | | GCTCTTCACATGCAGGCCCTGCCGCCTCGG |

139100

| | | |
|---|---|---|
| 139100- aa | 42 | QVQLVQSGAEVRKTGASVKVSCKASGYIFDNFGINWVRQAPGQGLEWMGWINP |
| ScFv domain | | KNNNTNYAQKFQGRVTITADESTNTAYMEVSSLRSEDTAVYYCARGPYYYQSY |
| | | MDVWGQGTMVTVSSASGGGGSGGRASGGGGSDIVMTQTPLSLPVTPGEPASIS |
| | | CRSSQSLLHSNGYNYLNWYLQKPGQSPQLLIYLGSKRASGVPDRFSGSGSGTD |
| | | FTLHITRVGAEDVGVYYCMQALQTPYTFGQGTKLEIK |
| 139100- nt | 57 | CAAGTCCAACTCGTCCAGTCCGGCGCAGAAGTCAGAAAAACCGGTGCTAGCGT |
| ScFv domain | | GAAAGTGTCCTGCAAGGCCTCCGGCTACATTTTCGATAACTTCGGAATCAACT |
| | | GGGTCAGACAGGCCCCGGGCCAGGGGCTGGAATGGATGGGATGGATCAACCCC |
| | | AAGAACAACAACACCAACTACGCACAGAAGTTCCAGGGCCGCGTGACTATCAC |
| | | CGCCGATGAATCGACCAATACCGCCTACATGGAGGTGTCCTCCCTGCGGTCGG |
| | | AGGACACTGCCGTGTATTACTGCGCGAGGGGCCCATACTACTACCAAAGCTAC |
| | | ATGGACGTCTGGGGACAGGGAACCATGGTGACCGTGTCATCCGCCTCCGGTGG |
| | | TGGAGGCTCCGGGGGGCGGGCTTCAGGAGGCGGAGGAAGCGATATTGTGATGA |
| | | CCCAGACTCCGCTTAGCCTGCCCGTGACTCCTGGAGAACCGGCCTCCATTTCC |
| | | TGCCGGTCCTCGCAATCACTCCTGCATTCCAACGGTTACAACTACCTGAATTG |
| | | GTACCTCCAGAAGCCTGGCCAGTCGCCCCAGTTGCTGATCTATCTGGGCTCGA |
| | | AGCGCGCCTCCGGGGTGCCTGACCGGTTTAGCGGATCTGGGAGCGGCACGGAC |
| | | TTCACTCTCCACATCACCCGCGTGGGAGCGGAGGACGTGGGAGTGTACTACTG |
| | | TATGCAGGCGCTGCAGACTCCGTACACATTCGGACAGGGCACCAAGCTGGAGA |
| | | TCAAG |
| 139100- aa | 72 | QVQLVQSGAEVRKTGASVKVSCKASGYIFDNFGINWVRQAPGQGLEWMGWINP |
| VH | | KNNNTNYAQKFQGRVTITADESTNTAYMEVSSLRSEDTAVYYCARGPYYYQSY |
| | | MDVWGQGTMVTVSS |
| 139100- aa | 87 | DIVMTQTPLSLPVTPGEPASISCRSSQSLLHSNGYNYLNWYLQKPGQSPQLLI |
| VL | | YLGSKRASGVPDRFSGSGSGTDFTLHITRVGAEDVGVYYCMQALQTPYTFGQG |
| | | TKLEIK |
| 139100- aa | 102 | MALPVTALLLPLALLLHAARPQVQLVQSGAEVRKTGASVKVSCKASGYIFDNF |
| Full CAR | | GINWVRQAPGQGLEWMGWINPKNNNTNYAQKFQGRVTITADESTNTAYMEVSS |
| | | LRSEDTAVYYCARGPYYYQSYMDVWGQGTMVTVSSASGGGGSGGRASGGGGSD |
| | | IVMTQTPLSLPVTPGEPASISCRSSQSLLHSNGYNYLNWYLQKPGQSPQLLIY |
| | | LGSKRASGVPDRFSGSGSGTDFTLHITRVGAEDVGVYYCMQALQTPYTFGQGT |
| | | KLEIKTTTPAPRPPTPAPTIASQPLSLRPEACRPAAGGAVHTRGLDFACDIYI |
| | | WAPLAGTCGVLLLSLVITLYCKRGRKKLLYIFKQPFMRPVQTTQEEDGCSCRF |
| | | PEEEEGGCELRVKFSRSADAPAYKQGQNQLYNELNLGRREEYDVLDKRRGRDP |
| | | EMGGKPRRKNPQEGLYNELQKDKMAEAYSEIGMKGERRRGKGHDGLYQGLSTA |
| | | TKDTYDALHMQALPPR |
| 139100- nt | 117 | ATGGCCCTCCCTGTCACCGCCCTGCTGCTTCCGCTGGCTCTTCTGCTCCACGC |
| Full CAR | | CGCTCGGCCCCAAGTCCAACTCGTCCAGTCCGGCGCAGAAGTCAGAAAAACCG |
| | | GTGCTAGCGTGAAAGTGTCCTGCAAGGCCTCCGGCTACATTTTCGATAACTTC |
| | | GGAATCAACTGGGTCAGACAGGCCCCGGGCCAGGGGCTGGAATGGATGGGATG |
| | | GATCAACCCCAAGAACAACAACACCAACTACGCACAGAAGTTCCAGGGCCGCG |
| | | TGACTATCACCGCCGATGAATCGACCAATACCGCCTACATGGAGGTGTCCTCC |
| | | CTGCGGTCGGAGGACACTGCCGTGTATTACTGCGCGAGGGGCCCATACTACTA |
| | | CCAAAGCTACATGGACGTCTGGGGACAGGGAACCATGGTGACCGTGTCATCCG |
| | | CCTCCGGTGGTGGAGGCTCCGGGGGGCGGGCTTCAGGAGGCGGAGGAAGCGAT |
| | | ATTGTGATGACCCAGACTCCGCTTAGCCTGCCCGTGACTCCTGGAGAACCGGC |
| | | CTCCATTTCCTGCCGGTCCTCGCAATCACTCCTGCATTCCAACGGTTACAACT |
| | | ACCTGAATTGGTACCTCCAGAAGCCTGGCCAGTCGCCCCAGTTGCTGATCTAT |
| | | CTGGGCTCGAAGCGCGCCTCCGGGGTGCCTGACCGGTTTAGCGGATCTGGGAG |
| | | CGGCACGGACTTCACTCTCCACATCACCCGCGTGGGAGCGGAGGACGTGGGAG |
| | | TGTACTACTGTATGCAGGCGCTGCAGACTCCGTACACATTCGGACAGGGCACC |
| | | AAGCTGGAGATCAAGACCACTACCCCAGCACCGAGGCCACCCACCCCGGCTCC |
| | | TACCATCGCCTCCCAGCCTCTGTCCCTGCGTCCGGAGGCATGTAGACCCGCAG |
| | | CTGGTGGGGCCGTGCATACCCGGGGTCTTGACTTCGCCTGCGATATCTACATT |
| | | TGGGCCCCTCTGGCTGGTACTTGCGGGGTCCTGCTGCTTTCACTCGTGATCAC |
| | | TCTTTACTGTAAGCGCGGTCGGAAGAAGCTGCTGTACATCTTTAAGCAACCCT |
| | | TCATGAGGCCTGTGCAGACTACTCAAGAGGAGGACGGCTGTTCATGCCGGTTC |
| | | CCAGAGGAGGAGGAAGGCGGCTGCGAACTGCGCGTGAAATTCAGCCGCAGCGC |
| | | AGATGCTCCAGCCTACAAGCAGGGGCAGAACCAGCTCTACAACGAACTCAATC |
| | | TTGGTCGGAGAGAGGAGTACGACGTGCTGGACAAGCGGAGAGGACGGGACCCA |
| | | GAAATGGGCGGGAAGCCGCGCAGAAAGAATCCCCAAGAGGGCCTGTACAACGA |
| | | GCTCCAAAAGGATAAGATGGCAGAAGCCTATAGCGAGATTGGTATGAAAGGGG |
| | | AACGCAGAAGAGGCAAAGGCCACGACGGACTGTACCAGGGACTCAGCACCGCC |
| | | ACCAAGGACACCTATGACGCTCTTCACATGCAGGCCCTGCCGCCTCGG |

139101

| | | |
|---|---|---|
| 139101- aa | 43 | QVQLQESGGGLVQPGGSLRLSCAASGFTFSSDAMTWVRQAPGKGLEWVSVISG |
| ScFv domain | | SGGTTYYADSVKGRFTISRDNSKNTLYLQMNSLRAEDTAVYYCAKLDSSGYYY |
| | | ARGPRYWGQGTLVTVSSASGGGGSGGRASGGGGSDIQLTQSPSSLSASVGDRV |
| | | TITCRASQSISSYLNWYQQKPGKAPKLLIYGASTLASGVPARFSGSGSGTHFT |
| | | LTINSLQSEDSATYYCQQSYKRASFGQGTKVEIK |
| 139101- nt | 58 | CAAGTGCAACTTCAAGAATCAGGCGGAGGACTCGTGCAGCCCGGAGGATCATT |
| ScFv domain | | GCGGCTCTCGTGCGCCGCCTCGGGCTTCACCTTCTCGAGCGACGCCATGACCT |
| | | GGGTCCGCCAGGCCCCGGGGAAGGGGCTGGAATGGGTGTCTGTGATTTCCGGC |
| | | TCCGGGGGAACTACGTACTACGCCGATTCCGTGAAAGGTCGCTTCACTATCTC |
| | | CCGGGACAACAGCAAGAACACCCTTTATCTGCAAATGAATTCCCTCCGCGCCG |
| | | AGGACACCGCCGTGTACTACTGCGCCAAGCTGGACTCCTCGGGCTACTACTAT |
| | | GCCCGGGGTCCGAGATACTGGGGACAGGGAACCCTCGTGACCGTGTCCTCCGC |
| | | GTCCGGCGGAGGAGGGTCGGGAGGGCGGGCCTCCGGCGGCGGCGGTTCGGACA |
| | | TCCAGCTGACCCAGTCCCCATCCTCACTGAGCGCAAGCGTGGGCGACAGAGTC |
| | | ACCATTACATGCAGGGCGTCCCAGAGCATCAGCTCCTACCTGAACTGGTACCA |
| | | ACAGAAGCCTGGAAAGGCTCCTAAGCTGTTGATCTACGGGGCTTCGACCCTGG |
| | | CATCCGGGGTGCCCGCGAGGTTTAGCGGAAGCGGTAGCGGCACTCACTTCACT |
| | | CTGACCATTAACAGCCTCCAGTCCGAGGATTCAGCCACTTACTACTGTCAGCA |
| | | GTCCTACAAGCGGGCCAGCTTCGGACAGGGCACTAAGGTCGAGATCAAG |
| 139101- aa | 73 | QVQLQESGGGLVQPGGSLRLSCAASGFTFSSDAMTWVRQAPGKGLEWVSVISG |
| VH | | SGGTTYYADSVKGRFTISRDNSKNTLYLQMNSLRAEDTAVYYCAKLDSSGYYY |
| | | ARGPRYWGQGTLVTVSS |
| 139101- aa | 88 | DIQLTQSPSSLSASVGDRVTITCRASQSISSYLNWYQQKPGKAPKLLIYGAST |
| VL | | LASGVPARFSGSGSGTHFTLTINSLQSEDSATYYCQQSYKRASFGQGTKVEIK |
| 139101- aa | 103 | MALPVTALLLPLALLLHAARPQVQLQESGGGLVQPGGSLRLSCAASGFTFSSD |
| Full CAR | | AMTWVRQAPGKGLEWVSVISGSGGTTYYADSVKGRFTISRDNSKNTLYLQMNS |
| | | LRAEDTAVYYCAKLDSSGYYYARGPRYWGQGTLVTVSSASGGGGSGGRASGGG |
| | | GSDIQLTQSPSSLSASVGDRVTITCRASQSISSYLNWYQQKPGKAPKLLIYGA |
| | | STLASGVPARFSGSGSGTHFTLTINSLQSEDSATYYCQQSYKRASFGQGTKVE |
| | | IKTTTPAPRPPTPAPTIASQPLSLRPEACRPAAGGAVHTRGLDFACDIYIWAP |
| | | LAGTCGVLLLSLVITLYCKRGRKKLLYIFKQPFMRPVQTTQEEDGCSCRFPEE |
| | | EEGGCELRVKFSRSADAPAYKQGQNQLYNELNLGRREEYDVLDKRRGRDPEMG |
| | | GKPRRKNPQEGLYNELQKDKMAEAYSEIGMKGERRRGKGHDGLYQGLSTATKD |
| | | TYDALHMQALPPR |
| 139101- nt | 118 | ATGGCCCTCCCTGTCACCGCCCTGCTGCTTCCGCTGGCTCTTCTGCTCCACGC |
| Full CAR | | CGCTCGGCCCCAAGTGCAACTTCAAGAATCAGGCGGAGGACTCGTGCAGCCCG |
| | | GAGGATCATTGCGGCTCTCGTGCGCCGCCTCGGGCTTCACCTTCTCGAGCGAC |
| | | GCCATGACCTGGGTCCGCCAGGCCCCGGGGAAGGGGCTGGAATGGGTGTCTGT |
| | | GATTTCCGGCTCCGGGGGAACTACGTACTACGCCGATTCCGTGAAAGGTCGCT |
| | | TCACTATCTCCCGGGACAACAGCAAGAACACCCTTTATCTGCAAATGAATTCC |
| | | CTCCGCGCCGAGGACACCGCCGTGTACTACTGCGCCAAGCTGGACTCCTCGGG |
| | | CTACTACTATGCCCGGGGTCCGAGATACTGGGGACAGGGAACCCTCGTGACCG |
| | | TGTCCTCCGCGTCCGGCGGAGGAGGGTCGGGAGGGCGGGCCTCCGGCGGCGGC |
| | | GGTTCGGACATCCAGCTGACCCAGTCCCCATCCTCACTGAGCGCAAGCGTGGG |
| | | CGACAGAGTCACCATTACATGCAGGGCGTCCCAGAGCATCAGCTCCTACCTGA |
| | | ACTGGTACCAACAGAAGCCTGGAAAGGCTCCTAAGCTGTTGATCTACGGGGCT |
| | | TCGACCCTGGCATCCGGGGTGCCCGCGAGGTTTAGCGGAAGCGGTAGCGGCAC |
| | | TCACTTCACTCTGACCATTAACAGCCTCCAGTCCGAGGATTCAGCCACTTACT |
| | | ACTGTCAGCAGTCCTACAAGCGGGCCAGCTTCGGACAGGGCACTAAGGTCGAG |
| | | ATCAAGACCACTACCCCAGCACCGAGGCCACCCACCCCGGCTCCTACCATCGC |
| | | CTCCCAGCCTCTGTCCCTGCGTCCGGAGGCATGTAGACCCGCAGCTGGTGGGG |
| | | CCGTGCATACCCGGGGTCTTGACTTCGCCTGCGATATCTACATTTGGGCCCCT |
| | | CTGGCTGGTACTTGCGGGGTCCTGCTGCTTTCACTCGTGATCACTCTTTACTG |
| | | TAAGCGCGGTCGGAAGAAGCTGCTGTACATCTTTAAGCAACCCTTCATGAGGC |
| | | CTGTGCAGACTACTCAAGAGGAGGACGGCTGTTCATGCCGGTTCCCAGAGGAG |
| | | GAGGAAGGCGGCTGCGAACTGCGCGTGAAATTCAGCCGCAGCGCAGATGCTCC |
| | | AGCCTACAAGCAGGGGCAGAACCAGCTCTACAACGAACTCAATCTTGGTCGGA |
| | | GAGAGGAGTACGACGTGCTGGACAAGCGGAGAGGACGGGACCCAGAAATGGGC |
| | | GGGAAGCCGCGCAGAAAGAATCCCCAAGAGGGCCTGTACAACGAGCTCCAAAA |
| | | GGATAAGATGGCAGAAGCCTATAGCGAGATTGGTATGAAAGGGGAACGCAGAA |
| | | GAGGCAAAGGCCACGACGGACTGTACCAGGGACTCAGCACCGCCACCAAGGAC |
| | | ACCTATGACGCTCTTCACATGCAGGCCCTGCCGCCTCGG |

139102

| | | |
|---|---|---|
| 139102- aa | 44 | QVQLVQSGAEVKKPGASVKVSCKASGYTFSNYGITWVRQAPGQGLEWMGWISA |
| ScFv domain | | YNGNTNYAQKFQGRVTMTRNTSISTAYMELSSLRSEDTAVYYCARGPYYYYMD |
| | | VWGKGTMVTVSSASGGGGSGGRASGGGGSEIVMTQSPLSLPVTPGEPASISCR |
| | | SSQSLLYSNGYNYVDWYLQKPGQSPQLLIYLGSNRASGVPDRFSGSGSGTDFK |
| | | LQISRVEAEDVGIYYCMQGRQFPYSFGQGTKVEIK |
| 139102- nt | 59 | CAAGTCCAACTGGTCCAGAGCGGTGCAGAAGTGAAGAAGCCCGGAGCGAGCGT |
| ScFv domain | | GAAAGTGTCCTGCAAGGCTTCCGGGTACACCTTCTCCAACTACGGCATCACTT |
| | | GGGTGCGCCAGGCCCCGGGACAGGGCCTGGAATGGATGGGGTGGATTTCCGCG |
| | | TACAACGGCAATACGAACTACGCTCAGAAGTTCCAGGGTAGAGTGACCATGAC |
| | | TAGGAACACCTCCATTTCCACCGCCTACATGGAACTGTCCTCCCTGCGGAGCG |
| | | AGGACACCGCCGTGTACTATTGCGCCCGGGGACCATACTACTACTACATGGAT |
| | | GTCTGGGGGAAGGGGACTATGGTCACCGTGTCATCCGCCTCGGGAGGCGGCGG |
| | | ATCAGGAGGACGCGCCTCTGGTGGTGGAGGATCGGAGATCGTGATGACCCAGA |
| | | GCCCTCTCTCCTTGCCCGTGACTCCTGGGGAGCCCGCATCCATTTCATGCCGG |
| | | AGCTCCCAGTCACTTCTCTACTCCAACGGCTATAACTACGTGGATTGGTACCT |
| | | CCAAAAGCCGGGCCAGAGCCCGCAGCTGCTGATCTACCTGGGCTCGAACAGGG |
| | | CCAGCGGAGTGCCTGACCGGTTCTCCGGGTCGGGAAGCGGGACCGACTTCAAG |
| | | CTGCAAATCTCGAGAGTGGAGGCCGAGGACGTGGGAATCTACTACTGTATGCA |
| | | GGGCCGCCAGTTTCCGTACTCGTTCGGACAGGGCACCAAAGTGGAAATCAAG |
| 139102- aa | 74 | QVQLVQSGAEVKKPGASVKVSCKASGYTFSNYGITWVRQAPGQGLEWMGWISA |
| VH | | YNGNTNYAQKFQGRVTMTRNTSISTAYMELSSLRSEDTAVYYCARGPYYYYMD |
| | | VWGKGTMVTVSS |
| 139102- aa | 89 | EIVMTQSPLSLPVTPGEPASISCRSSQSLLYSNGYNYVDWYLQKPGQSPQLLI |
| VL | | YLGSNRASGVPDRFSGSGSGTDFKLQISRVEAEDVGIYYCMQGRQFPYSFGQG |
| | | TKVEIK |
| 139102- aa | 104 | MALPVTALLLPLALLLHAARPQVQLVQSGAEVKKPGASVKVSCKASGYTFSNY |
| Full CAR | | GITWVRQAPGQGLEWMGWISAYNGNTNYAQKFQGRVTMTRNTSISTAYMELSS |
| | | LRSEDTAVYYCARGPYYYYMDVWGKGTMVTVSSASGGGGSGGRASGGGGSEIV |
| | | MTQSPLSLPVTPGEPASISCRSSQSLLYSNGYNYVDWYLQKPGQSPQLLIYLG |
| | | SNRASGVPDRFSGSGSGTDFKLQISRVEAEDVGIYYCMQGRQFPYSFGQGTKV |
| | | EIKTTTPAPRPPTPAPTIASQPLSLRPEACRPAAGGAVHTRGLDFACDIYIWA |
| | | PLAGTCGVLLLSLVITLYCKRGRKKLLYIFKQPFMRPVQTTQEEDGCSCRFPE |
| | | EEEGGCELRVKFSRSADAPAYKQGQNQLYNELNLGRREEYDVLDKRRGRDPEM |
| | | GGKPRRKNPQEGLYNELQKDKMAEAYSEIGMKGERRRGKGHDGLYQGLSTATK |
| | | DTYDALHMQALPPR |
| 139102- nt | 119 | ATGGCCCTCCCTGTCACCGCCCTGCTGCTTCCGCTGGCTCTTCTGCTCCACGC |
| Full CAR | | CGCTCGGCCCCAAGTCCAACTGGTCCAGAGCGGTGCAGAAGTGAAGAAGCCCG |
| | | GAGCGAGCGTGAAAGTGTCCTGCAAGGCTTCCGGGTACACCTTCTCCAACTAC |
| | | GGCATCACTTGGGTGCGCCAGGCCCCGGGACAGGGCCTGGAATGGATGGGGTG |
| | | GATTTCCGCGTACAACGGCAATACGAACTACGCTCAGAAGTTCCAGGGTAGAG |
| | | TGACCATGACTAGGAACACCTCCATTTCCACCGCCTACATGGAACTGTCCTCC |
| | | CTGCGGAGCGAGGACACCGCCGTGTACTATTGCGCCCGGGGACCATACTACTA |
| | | CTACATGGATGTCTGGGGGAAGGGGACTATGGTCACCGTGTCATCCGCCTCGG |
| | | GAGGCGGCGGATCAGGAGGACGCGCCTCTGGTGGTGGAGGATCGGAGATCGTG |
| | | ATGACCCAGAGCCCTCTCTCCTTGCCCGTGACTCCTGGGGAGCCCGCATCCAT |
| | | TTCATGCCGGAGCTCCCAGTCACTTCTCTACTCCAACGGCTATAACTACGTGG |
| | | ATTGGTACCTCCAAAAGCCGGGCCAGAGCCCGCAGCTGCTGATCTACCTGGGC |
| | | TCGAACAGGGCCAGCGGAGTGCCTGACCGGTTCTCCGGGTCGGGAAGCGGGAC |
| | | CGACTTCAAGCTGCAAATCTCGAGAGTGGAGGCCGAGGACGTGGGAATCTACT |
| | | ACTGTATGCAGGGCCGCCAGTTTCCGTACTCGTTCGGACAGGGCACCAAAGTG |
| | | GAAATCAAGACCACTACCCCAGCACCGAGGCCACCCACCCCGGCTCCTACCAT |
| | | CGCCTCCCAGCCTCTGTCCCTGCGTCCGGAGGCATGTAGACCCGCAGCTGGTG |
| | | GGGCCGTGCATACCCGGGGTCTTGACTTCGCCTGCGATATCTACATTTGGGCC |
| | | CCTCTGGCTGGTACTTGCGGGGTCCTGCTGCTTTCACTCGTGATCACTCTTTA |
| | | CTGTAAGCGCGGTCGGAAGAAGCTGCTGTACATCTTTAAGCAACCCTTCATGA |
| | | GGCCTGTGCAGACTACTCAAGAGGAGGACGGCTGTTCATGCCGGTTCCCAGAG |
| | | GAGGAGGAAGGCGGCTGCGAACTGCGCGTGAAATTCAGCCGCAGCGCAGATGC |
| | | TCCAGCCTACAAGCAGGGGCAGAACCAGCTCTACAACGAACTCAATCTTGGTC |
| | | GGAGAGAGGAGTACGACGTGCTGGACAAGCGGAGAGGACGGGACCCAGAAATG |
| | | GGCGGGAAGCCGCGCAGAAAGAATCCCCAAGAGGGCCTGTACAACGAGCTCCA |
| | | AAAGGATAAGATGGCAGAAGCCTATAGCGAGATTGGTATGAAAGGGGAACGCA |
| | | GAAGAGGCAAAGGCCACGACGGACTGTACCAGGGACTCAGCACCGCCACCAAG |
| | | GACACCTATGACGCTCTTCACATGCAGGCCCTGCCGCCTCGG |

139104

| | | |
|---|---|---|
| 139104- aa | 45 | EVQLLETGGGLVQPGGSLRLSCAVSGFALSNHGMSWVRRAPGKGLEWVSGIVY |
| ScFv domain | | SGSTYYAASVKGRFTISRDNSRNTLYLQMNSLRPEDTAIYYCSAHGGESDVWG |
| | | QGTTVTVSSASGGGGSGGRASGGGGSEIVLTQSPATLSVSPGESATLSCRASQ |
| | | SVSSNLAWYQQKPGQAPRLLIYGASTRASGIPDRFSGSGSGTDFTLTISSLQA |
| | | EDVAVYYCQQYGSSLTFGGGTKVEIK |
| 139104- nt | 60 | GAAGTGCAATTGCTCGAAACTGGAGGAGGTCTGGTGCAACCTGGAGGATCACT |
| ScFv domain | | TCGCCTGTCCTGCGCCGTGTCGGGCTTTGCCCTGTCCAACCATGGAATGAGCT |
| | | GGGTCCGCCGCGCGCCGGGGAAGGGCCTCGAATGGGTGTCCGGCATCGTCTAC |
| | | TCCGGCTCCACCTACTACGCCGCGTCCGTGAAGGGCCGGTTCACGATTTCACG |
| | | GGACAACTCGCGGAACACCCTGTACCTCCAAATGAATTCCCTTCGGCCGGAGG |
| | | ATACTGCCATCTACTACTGCTCCGCCCACGGTGGCGAATCCGACGTCTGGGGC |
| | | CAGGGAACCACCGTGACCGTGTCCAGCGCGTCCGGGGGAGGAGGAAGCGGGGG |
| | | TAGAGCATCGGGTGGAGGCGGATCAGAGATCGTGCTGACCCAGTCCCCCGCCA |
| | | CCTTGAGCGTGTCACCAGGAGAGTCCGCCACCCTGTCATGCCGCGCCAGCCAG |
| | | TCCGTGTCCTCCAACCTGGCTTGGTACCAGCAGAAGCCGGGGCAGGCCCCTAG |
| | | ACTCCTGATCTATGGGGCGTCGACCCGGGCATCTGGAATTCCCGATAGGTTCA |
| | | GCGGATCGGGCTCGGGCACTGACTTCACTCTGACCATCTCCTCGCTGCAAGCC |
| | | GAGGACGTGGCTGTGTACTACTGTCAGCAGTACGGAAGCTCCCTGACTTTCGG |
| | | TGGCGGGACCAAAGTCGAGATTAAG |
| 139104- aa | 75 | EVQLLETGGGLVQPGGSLRLSCAVSGFALSNHGMSWVRRAPGKGLEWVSGIVY |
| VH | | SGSTYYAASVKGRFTISRDNSRNTLYLQMNSLRPEDTAIYYCSAHGGESDVWG |
| | | QGTTVTVSS |
| 139104- aa | 90 | EIVLTQSPATLSVSPGESATLSCRASQSVSSNLAWYQQKPGQAPRLLIYGAST |
| VL | | RASGIPDRFSGSGSGTDFTLTISSLQAEDVAVYYCQQYGSSLTFGGGTKVEIK |
| 139104- aa | 105 | MALPVTALLLPLALLLHAARPEVQLLETGGGLVQPGGSLRLSCAVSGFALSNH |
| Full CAR | | GMSWVRRAPGKGLEWVSGIVYSGSTYYAASVKGRFTISRDNSRNTLYLQMNSL |
| | | RPEDTAIYYCSAHGGESDVWGQGTTVTVSSASGGGGSGGRASGGGGSEIVLTQ |
| | | SPATLSVSPGESATLSCRASQSVSSNLAWYQQKPGQAPRLLIYGASTRASGIP |
| | | DRFSGSGSGTDFTLTISSLQAEDVAVYYCQQYGSSLTFGGGTKVEIKTTTPAP |
| | | RPPTPAPTIASQPLSLRPEACRPAAGGAVHTRGLDFACDIYIWAPLAGTCGVL |
| | | LLSLVITLYCKRGRKKLLYIFKQPFMRPVQTTQEEDGCSCRFPEEEEGGCELR |
| | | VKFSRSADAPAYKQGQNQLYNELNLGRREEYDVLDKRRGRDPEMGGKPRRKNP |
| | | QEGLYNELQKDKMAEAYSEIGMKGERRRGKGHDGLYQGLSTATKDTYDALHMQ |
| | | ALPPR |
| 139104- nt | 120 | ATGGCCCTCCCTGTCACCGCCCTGCTGCTTCCGCTGGCTCTTCTGCTCCACGC |
| Full CAR | | CGCTCGGCCCGAAGTGCAATTGCTCGAAACTGGAGGAGGTCTGGTGCAACCTG |
| | | GAGGATCACTTCGCCTGTCCTGCGCCGTGTCGGGCTTTGCCCTGTCCAACCAT |
| | | GGAATGAGCTGGGTCCGCCGCGCGCCGGGGAAGGGCCTCGAATGGGTGTCCGG |
| | | CATCGTCTACTCCGGCTCCACCTACTACGCCGCGTCCGTGAAGGGCCGGTTCA |
| | | CGATTTCACGGGACAACTCGCGGAACACCCTGTACCTCCAAATGAATTCCCTT |
| | | CGGCCGGAGGATACTGCCATCTACTACTGCTCCGCCCACGGTGGCGAATCCGA |
| | | CGTCTGGGGCCAGGGAACCACCGTGACCGTGTCCAGCGCGTCCGGGGGAGGAG |
| | | GAAGCGGGGGTAGAGCATCGGGTGGAGGCGGATCAGAGATCGTGCTGACCCAG |
| | | TCCCCCGCCACCTTGAGCGTGTCACCAGGAGAGTCCGCCACCCTGTCATGCCG |
| | | CGCCAGCCAGTCCGTGTCCTCCAACCTGGCTTGGTACCAGCAGAAGCCGGGGC |
| | | AGGCCCCTAGACTCCTGATCTATGGGGCGTCGACCCGGGCATCTGGAATTCCC |
| | | GATAGGTTCAGCGGATCGGGCTCGGGCACTGACTTCACTCTGACCATCTCCTC |
| | | GCTGCAAGCCGAGGACGTGGCTGTGTACTACTGTCAGCAGTACGGAAGCTCCC |
| | | TGACTTTCGGTGGCGGGACCAAAGTCGAGATTAAGACCACTACCCCAGCACCG |
| | | AGGCCACCCACCCCGGCTCCTACCATCGCCTCCCAGCCTCTGTCCCTGCGTCC |
| | | GGAGGCATGTAGACCCGCAGCTGGTGGGGCCGTGCATACCCGGGGTCTTGACT |
| | | TCGCCTGCGATATCTACATTTGGGCCCCTCTGGCTGGTACTTGCGGGGTCCTG |
| | | CTGCTTTCACTCGTGATCACTCTTTACTGTAAGCGCGGTCGGAAGAAGCTGCT |
| | | GTACATCTTTAAGCAACCCTTCATGAGGCCTGTGCAGACTACTCAAGAGGAGG |
| | | ACGGCTGTTCATGCCGGTTCCCAGAGGAGGAGGAAGGCGGCTGCGAACTGCGC |
| | | GTGAAATTCAGCCGCAGCGCAGATGCTCCAGCCTACAAGCAGGGGCAGAACCA |
| | | GCTCTACAACGAACTCAATCTTGGTCGGAGAGAGGAGTACGACGTGCTGGACA |
| | | AGCGGAGAGGACGGGACCCAGAAATGGGCGGGAAGCCGCGCAGAAAGAATCCC |
| | | CAAGAGGGCCTGTACAACGAGCTCCAAAAGGATAAGATGGCAGAAGCCTATAG |
| | | CGAGATTGGTATGAAAGGGGAACGCAGAAGAGGCAAAGGCCACGACGGACTGT |
| | | ACCAGGGACTCAGCACCGCCACCAAGGACACCTATGACGCTCTTCACATGCAG |
| | | GCCCTGCCGCCTCGG |

139106

| | | |
|---|---|---|
| 139106- aa | 46 | EVQLVETGGGLVQPGGSLRLSCAVSGFALSNHGMSWVRRAPGKGLEWVSGIVY |
| ScFv domain | | SGSTYYAASVKGRFTISRDNSRNTLYLQMNSLRPEDTAIYYCSAHGGESDVWG |
| | | QGTTVTVSSASGGGGSGGRASGGGGSEIVMTQSPATLSVSPGERATLSCRASQ |
| | | SVSSKLAWYQQKPGQAPRLLMYGASIRATGIPDRFSGSGSGTEFTLTISSLEP |
| | | EDFAVYYCQQYGSSSWTFGQGTKVEIK |
| 139106- nt | 61 | GAAGTGCAATTGGTGGAAACTGGAGGAGGACTTGTGCAACCTGGAGGATCATT |
| ScFv domain | | GAGACTGAGCTGCGCAGTGTCGGGATTCGCCCTGAGCAACCATGGAATGTCCT |
| | | GGGTCAGAAGGGCCCCTGGAAAAGGCCTCGAATGGGTGTCAGGGATCGTGTAC |
| | | TCCGGTTCCACTTACTACGCCGCCTCCGTGAAGGGGCGCTTCACTATCTCACG |
| | | GGATAACTCCCGCAATACCCTGTACCTCCAAATGAACAGCCTGCGGCCGGAGG |
| | | ATACCGCCATCTACTACTGTTCCGCCCACGGTGGAGAGTCTGACGTCTGGGGC |
| | | CAGGGAACTACCGTGACCGTGTCCTCCGCGTCCGGCGGTGGAGGGAGCGGCGG |
| | | CCGCGCCAGCGGCGGCGGAGGCTCCGAGATCGTGATGACCCAGAGCCCCGCTA |
| | | CTCTGTCGGTGTCGCCCGGAGAAAGGGCGACCCTGTCCTGCCGGGCGTCGCAG |
| | | TCCGTGAGCAGCAAGCTGGCTTGGTACCAGCAGAAGCCGGGCCAGGCACCACG |
| | | CCTGCTTATGTACGGTGCCTCCATTCGGGCCACCGGAATCCCGGACCGGTTCT |
| | | CGGGGTCGGGGTCCGGTACCGAGTTCACACTGACCATTTCCTCGCTCGAGCCC |
| | | GAGGACTTTGCCGTCTATTACTGCCAGCAGTACGGCTCCTCCTCATGGACGTT |
| | | CGGCCAGGGGACCAAGGTCGAAATCAAG |
| 139106- aa | 76 | EVQLVETGGGLVQPGGSLRLSCAVSGFALSNHGMSWVRRAPGKGLEWVSGIVY |
| VH | | SGSTYYAASVKGRFTISRDNSRNTLYLQMNSLRPEDTAIYYCSAHGGESDVWG |
| | | QGTTVTVSS |
| 139106- aa | 91 | EIVMTQSPATLSVSPGERATLSCRASQSVSSKLAWYQQKPGQAPRLLMYGASI |
| VL | | RATGIPDRFSGSGSGTEFTLTISSLEPEDFAVYYCQQYGSSSWTFGQGTKVEI |
| | | K |
| 139106- aa | 106 | MALPVTALLLPLALLLHAARPEVQLVETGGGLVQPGGSLRLSCAVSGFALSNH |
| Full CAR | | GMSWVRRAPGKGLEWVSGIVYSGSTYYAASVKGRFTISRDNSRNTLYLQMNSL |
| | | RPEDTAIYYCSAHGGESDVWGQGTTVTVSSASGGGGSGGRASGGGGSEIVMTQ |
| | | SPATLSVSPGERATLSCRASQSVSSKLAWYQQKPGQAPRLLMYGASIRATGIP |
| | | DRFSGSGSGTEFTLTISSLEPEDFAVYYCQQYGSSSWTFGQGTKVEIKTTTPA |
| | | PRPPTPAPTIASQPLSLRPEACRPAAGGAVHTRGLDFACDIYIWAPLAGTCGV |
| | | LLLSLVITLYCKRGRKKLLYIFKQPFMRPVQTTQEEDGCSCRFPEEEEGGCEL |
| | | RVKFSRSADAPAYKQGQNQLYNELNLGRREEYDVLDKRRGRDPEMGGKPRRKN |
| | | PQEGLYNELQKDKMAEAYSEIGMKGERRRGKGHDGLYQGLSTATKDTYDALHM |
| | | QALPPR |
| 139106- nt | 121 | ATGGCCCTCCCTGTCACCGCCCTGCTGCTTCCGCTGGCTCTTCTGCTCCACGC |
| Full CAR | | CGCTCGGCCCGAAGTGCAATTGGTGGAAACTGGAGGAGGACTTGTGCAACCTG |
| | | GAGGATCATTGAGACTGAGCTGCGCAGTGTCGGGATTCGCCCTGAGCAACCAT |
| | | GGAATGTCCTGGGTCAGAAGGGCCCCTGGAAAAGGCCTCGAATGGGTGTCAGG |
| | | GATCGTGTACTCCGGTTCCACTTACTACGCCGCCTCCGTGAAGGGGCGCTTCA |
| | | CTATCTCACGGGATAACTCCCGCAATACCCTGTACCTCCAAATGAACAGCCTG |
| | | CGGCCGGAGGATACCGCCATCTACTACTGTTCCGCCCACGGTGGAGAGTCTGA |
| | | CGTCTGGGGCCAGGGAACTACCGTGACCGTGTCCTCCGCGTCCGGCGGTGGAG |
| | | GGAGCGGCGGCCGCGCCAGCGGCGGCGGAGGCTCCGAGATCGTGATGACCCAG |
| | | AGCCCCGCTACTCTGTCGGTGTCGCCCGGAGAAAGGGCGACCCTGTCCTGCCG |
| | | GGCGTCGCAGTCCGTGAGCAGCAAGCTGGCTTGGTACCAGCAGAAGCCGGGCC |
| | | AGGCACCACGCCTGCTTATGTACGGTGCCTCCATTCGGGCCACCGGAATCCCG |
| | | GACCGGTTCTCGGGGTCGGGGTCCGGTACCGAGTTCACACTGACCATTTCCTC |
| | | GCTCGAGCCCGAGGACTTTGCCGTCTATTACTGCCAGCAGTACGGCTCCTCCT |
| | | CATGGACGTTCGGCCAGGGGACCAAGGTCGAAATCAAGACCACTACCCCAGCA |
| | | CCGAGGCCACCCACCCCGGCTCCTACCATCGCCTCCCAGCCTCTGTCCCTGCG |
| | | TCCGGAGGCATGTAGACCCGCAGCTGGTGGGGCCGTGCATACCCGGGGTCTTG |
| | | ACTTCGCCTGCGATATCTACATTTGGGCCCCTCTGGCTGGTACTTGCGGGGTC |
| | | CTGCTGCTTTCACTCGTGATCACTCTTTACTGTAAGCGCGGTCGGAAGAAGCT |
| | | GCTGTACATCTTTAAGCAACCCTTCATGAGGCCTGTGCAGACTACTCAAGAGG |
| | | AGGACGGCTGTTCATGCCGGTTCCCAGAGGAGGAGGAAGGCGGCTGCGAACTG |
| | | CGCGTGAAATTCAGCCGCAGCGCAGATGCTCCAGCCTACAAGCAGGGGCAGAA |
| | | CCAGCTCTACAACGAACTCAATCTTGGTCGGAGAGAGGAGTACGACGTGCTGG |
| | | ACAAGCGGAGAGGACGGGACCCAGAAATGGGCGGGAAGCCGCGCAGAAAGAAT |
| | | CCCCAAGAGGGCCTGTACAACGAGCTCCAAAAGGATAAGATGGCAGAAGCCTA |
| | | TAGCGAGATTGGTATGAAAGGGGAACGCAGAAGAGGCAAAGGCCACGACGGAC |
| | | TGTACCAGGGACTCAGCACCGCCACCAAGGACACCTATGACGCTCTTCACATG |
| | | CAGGCCCTGCCGCCTCGG |

139107

| | | |
|---|---|---|
| 139107- aa | 47 | EVQLVETGGGVVQPGGSLRLSCAVSGFALSNHGMSWVRRAPGKGLEWVSGIVY |
| ScFv domain | | SGSTYYAASVKGRFTISRDNSRNTLYLQMNSLRPEDTAIYYCSAHGGESDVWG |
| | | QGTTVTVSSASGGGGSGGRASGGGGSEIVLTQSPGTLSLSPGERATLSCRASQ |
| | | SVGSTNLAWYQQKPGQAPRLLIYDASNRATGIPDRFSGGGSGTDFTLTISRLE |
| | | PEDFAVYYCQQYGSSPPWTFGQGTKVEIK |
| 139107- nt | 62 | GAAGTGCAATTGGTGGAGACTGGAGGAGGAGTGGTGCAACCTGGAGGAAGCCT |
| ScFv domain | | GAGACTGTCATGCGCGGTGTCGGGCTTCGCCCTCTCCAACCACGGAATGTCCT |
| | | GGGTCCGCCGGGCCCCTGGGAAAGGACTTGAATGGGTGTCCGGCATCGTGTAC |
| | | TCGGGTTCCACCTACTACGCGGCCTCAGTGAAGGGCCGGTTTACTATTAGCCG |
| | | CGACAACTCCAGAAACACACTGTACCTCCAAATGAACTCGCTGCGGCCGGAAG |
| | | ATACCGCTATCTACTACTGCTCCGCCCATGGGGGAGAGTCGGACGTCTGGGGA |
| | | CAGGGCACCACTGTCACTGTGTCCAGCGCTTCCGGCGGTGGTGGAAGCGGGGG |
| | | ACGGGCCTCAGGAGGCGGTGGCAGCGAGATTGTGCTGACCCAGTCCCCCGGGA |
| | | CCCTGAGCCTGTCCCCGGGAGAAAGGGCCACCCTCTCCTGTCGGGCATCCCAG |
| | | TCCGTGGGGTCTACTAACCTTGCATGGTACCAGCAGAAGCCCGGCCAGGCCCC |
| | | TCGCCTGCTGATCTACGACGCGTCCAATAGAGCCACCGGCATCCCGGATCGCT |
| | | TCAGCGGAGGCGGATCGGGCACCGACTTCACCCTCACCATTTCAAGGCTGGAA |
| | | CCGGAGGACTTCGCCGTGTACTACTGCCAGCAGTATGGTTCGTCCCCACCCTG |
| | | GACGTTCGGCCAGGGGACTAAGGTCGAGATCAAG |
| 139107- aa | 77 | EVQLVETGGGVVQPGGSLRLSCAVSGFALSNHGMSWVRRAPGKGLEWVSGIVY |
| VH | | SGSTYYAASVKGRFTISRDNSRNTLYLQMNSLRPEDTAIYYCSAHGGESDVWG |
| | | QGTTVTVSS |
| 139107- aa | 92 | EIVLTQSPGTLSLSPGERATLSCRASQSVGSTNLAWYQQKPGQAPRLLIYDAS |
| VL | | NRATGIPDRFSGGGSGTDFTLTISRLEPEDFAVYYCQQYGSSPPWTFGQGTKV |
| | | EIK |
| 139107- aa | 107 | MALPVTALLLPLALLLHAARPEVQLVETGGGVVQPGGSLRLSCAVSGFALSNH |
| Full CAR | | GMSWVRRAPGKGLEWVSGIVYSGSTYYAASVKGRFTISRDNSRNTLYLQMNSL |
| | | RPEDTAIYYCSAHGGESDVWGQGTTVTVSSASGGGGSGGRASGGGGSEIVLTQ |
| | | SPGTLSLSPGERATLSCRASQSVGSTNLAWYQQKPGQAPRLLIYDASNRATGI |
| | | PDRFSGGGSGTDFTLTISRLEPEDFAVYYCQQYGSSPPWTFGQGTKVEIKTTT |
| | | PAPRPPTPAPTIASQPLSLRPEACRPAAGGAVHTRGLDFACDIYIWAPLAGTC |
| | | GVLLLSLVITLYCKRGRKKLLYIFKQPFMRPVQTTQEEDGCSCRFPEEEEGGC |
| | | ELRVKFSRSADAPAYKQGQNQLYNELNLGRREEYDVLDKRRGRDPEMGGKPRR |
| | | KNPQEGLYNELQKDKMAEAYSEIGMKGERRRGKGHDGLYQGLSTATKDTYDAL |
| | | HMQALPPR |
| 139107- nt | 122 | ATGGCCCTCCCTGTCACCGCCCTGCTGCTTCCGCTGGCTCTTCTGCTCCACGC |
| Full CAR | | CGCTCGGCCCGAAGTGCAATTGGTGGAGACTGGAGGAGGAGTGGTGCAACCTG |
| | | GAGGAAGCCTGAGACTGTCATGCGCGGTGTCGGGCTTCGCCCTCTCCAACCAC |
| | | GGAATGTCCTGGGTCCGCCGGGCCCCTGGGAAAGGACTTGAATGGGTGTCCGG |
| | | CATCGTGTACTCGGGTTCCACCTACTACGCGGCCTCAGTGAAGGGCCGGTTTA |
| | | CTATTAGCCGCGACAACTCCAGAAACACACTGTACCTCCAAATGAACTCGCTG |
| | | CGGCCGGAAGATACCGCTATCTACTACTGCTCCGCCCATGGGGGAGAGTCGGA |
| | | CGTCTGGGGACAGGGCACCACTGTCACTGTGTCCAGCGCTTCCGGCGGTGGTG |
| | | GAAGCGGGGGACGGGCCTCAGGAGGCGGTGGCAGCGAGATTGTGCTGACCCAG |
| | | TCCCCCGGGACCCTGAGCCTGTCCCCGGGAGAAAGGGCCACCCTCTCCTGTCG |
| | | GGCATCCCAGTCCGTGGGGTCTACTAACCTTGCATGGTACCAGCAGAAGCCCG |
| | | GCCAGGCCCCTCGCCTGCTGATCTACGACGCGTCCAATAGAGCCACCGGCATC |
| | | CCGGATCGCTTCAGCGGAGGCGGATCGGGCACCGACTTCACCCTCACCATTTC |
| | | AAGGCTGGAACCGGAGGACTTCGCCGTGTACTACTGCCAGCAGTATGGTTCGT |
| | | CCCCACCCTGGACGTTCGGCCAGGGGACTAAGGTCGAGATCAAGACCACTACC |
| | | CCAGCACCGAGGCCACCCACCCCGGCTCCTACCATCGCCTCCCAGCCTCTGTC |
| | | CCTGCGTCCGGAGGCATGTAGACCCGCAGCTGGTGGGGCCGTGCATACCCGGG |
| | | GTCTTGACTTCGCCTGCGATATCTACATTTGGGCCCCTCTGGCTGGTACTTGC |
| | | GGGGTCCTGCTGCTTTCACTCGTGATCACTCTTTACTGTAAGCGCGGTCGGAA |
| | | GAAGCTGCTGTACATCTTTAAGCAACCCTTCATGAGGCCTGTGCAGACTACTC |
| | | AAGAGGAGGACGGCTGTTCATGCCGGTTCCCAGAGGAGGAGGAAGGCGGCTGC |
| | | GAACTGCGCGTGAAATTCAGCCGCAGCGCAGATGCTCCAGCCTACAAGCAGGG |
| | | GCAGAACCAGCTCTACAACGAACTCAATCTTGGTCGGAGAGAGGAGTACGACG |
| | | TGCTGGACAAGCGGAGAGGACGGGACCCAGAAATGGGCGGGAAGCCGCGCAGA |
| | | AAGAATCCCCAAGAGGGCCTGTACAACGAGCTCCAAAAGGATAAGATGGCAGA |
| | | AGCCTATAGCGAGATTGGTATGAAAGGGGAACGCAGAAGAGGCAAAGGCCACG |
| | | ACGGACTGTACCAGGGACTCAGCACCGCCACCAAGGACACCTATGACGCTCTT |
| | | CACATGCAGGCCCTGCCGCCTCGG |

139108

| | | |
|---|---|---|
| 139108- aa | 48 | QVQLVESGGGLVKPGGSLRLSCAASGFTFSDYYMSWIRQAPGKGLEWVSYISS |
| ScFv domain | | SGSTIYYADSVKGRFTISRDNAKNSLYLQMNSLRAEDTAVYYCARESGDGMDV |
| | | WGQGTTVTVSSASGGGGSGGRASGGGGSDIQMTQSPSSLSASVGDRVTITCRA |
| | | SQSISSYLNWYQQKPGKAPKLLIYAASSLQSGVPSRFSGSGSGTDFTLTISSL |
| | | QPEDFATYYCQQSYTLAFGQGTKVDIK |
| 139108- nt | 63 | CAAGTGCAACTCGTGGAATCTGGTGGAGGACTCGTGAAACCTGGAGGATCATT |
| ScFv domain | | GAGACTGTCATGCGCGGCCTCGGGATTCACGTTCTCCGATTACTACATGAGCT |
| | | GGATTCGCCAGGCTCCGGGGAAGGGACTGGAATGGGTGTCCTACATTTCCTCA |
| | | TCCGGCTCCACCATCTACTACGCGGACTCCGTGAAGGGGAGATTCACCATTAG |
| | | CCGCGATAACGCCAAGAACAGCCTGTACCTTCAGATGAACTCCCTGCGGGCTG |
| | | AAGATACTGCCGTCTACTACTGCGCAAGGGAGAGCGGAGATGGGATGGACGTC |
| | | TGGGGACAGGGTACCACTGTGACCGTGTCGTCGGCCTCCGGCGGAGGGGGTTC |
| | | GGGTGGAAGGGCCAGCGGCGGCGGAGGCAGCGACATCCAGATGACCCAGTCCC |
| | | CCTCATCGCTGTCCGCCTCCGTGGGCGACCGCGTCACCATCACATGCCGGGCC |
| | | TCACAGTCGATCTCCTCCTACCTCAATTGGTATCAGCAGAAGCCCGGAAAGGC |
| | | CCCTAAGCTTCTGATCTACGCAGCGTCCTCCCTGCAATCCGGGGTCCCATCTC |
| | | GGTTCTCCGGCTCGGGCAGCGGTACCGACTTCACTCTGACCATCTCGAGCCTG |
| | | CAGCCGGAGGACTTCGCCACTTACTACTGTCAGCAAAGCTACACCCTCGCGTT |
| | | TGGCCAGGGCACCAAAGTGGACATCAAG |
| 139108- aa | 78 | QVQLVESGGGLVKPGGSLRLSCAASGFTFSDYYMSWIRQAPGKGLEWVSYISS |
| VH | | SGSTIYYADSVKGRFTISRDNAKNSLYLQMNSLRAEDTAVYYCARESGDGMDV |
| | | WGQGTTVTVSS |
| 139108- aa | 93 | DIQMTQSPSSLSASVGDRVTITCRASQSISSYLNWYQQKPGKAPKLLIYAASS |
| VL | | LQSGVPSRFSGSGSGTDFTLTISSLQPEDFATYYCQQSYTLAFGQGTKVDIK |
| 139108- aa | 108 | MALPVTALLLPLALLLHAARPQVQLVESGGGLVKPGGSLRLSCAASGFTFSDY |
| Full CAR | | YMSWIRQAPGKGLEWVSYISSSGSTIYYADSVKGRFTISRDNAKNSLYLQMNS |
| | | LRAEDTAVYYCARESGDGMDVWGQGTTVTVSSASGGGGSGGRASGGGGSDIQM |
| | | TQSPSSLSASVGDRVTITCRASQSISSYLNWYQQKPGKAPKLLIYAASSLQSG |
| | | VPSRFSGSGSGTDFTLTISSLQPEDFATYYCQQSYTLAFGQGTKVDIKTTTPA |
| | | PRPPTPAPTIASQPLSLRPEACRPAAGGAVHTRGLDFACDIYIWAPLAGTCGV |
| | | LLLSLVITLYCKRGRKKLLYIFKQPFMRPVQTTQEEDGCSCRFPEEEEGGCEL |
| | | RVKFSRSADAPAYKQGQNQLYNELNLGRREEYDVLDKRRGRDPEMGGKPRRKN |
| | | PQEGLYNELQKDKMAEAYSEIGMKGERRRGKGHDGLYQGLSTATKDTYDALHM |
| | | QALPPR |
| 139108- nt | 123 | ATGGCCCTCCCTGTCACCGCCCTGCTGCTTCCGCTGGCTCTTCTGCTCCACGC |
| Full CAR | | CGCTCGGCCCCAAGTGCAACTCGTGGAATCTGGTGGAGGACTCGTGAAACCTG |
| | | GAGGATCATTGAGACTGTCATGCGCGGCCTCGGGATTCACGTTCTCCGATTAC |
| | | TACATGAGCTGGATTCGCCAGGCTCCGGGGAAGGGACTGGAATGGGTGTCCTA |
| | | CATTTCCTCATCCGGCTCCACCATCTACTACGCGGACTCCGTGAAGGGGAGAT |
| | | TCACCATTAGCCGCGATAACGCCAAGAACAGCCTGTACCTTCAGATGAACTCC |
| | | CTGCGGGCTGAAGATACTGCCGTCTACTACTGCGCAAGGGAGAGCGGAGATGG |
| | | GATGGACGTCTGGGGACAGGGTACCACTGTGACCGTGTCGTCGGCCTCCGGCG |
| | | GAGGGGGTTCGGGTGGAAGGGCCAGCGGCGGCGGAGGCAGCGACATCCAGATG |
| | | ACCCAGTCCCCCTCATCGCTGTCCGCCTCCGTGGGCGACCGCGTCACCATCAC |
| | | ATGCCGGGCCTCACAGTCGATCTCCTCCTACCTCAATTGGTATCAGCAGAAGC |
| | | CCGGAAAGGCCCCTAAGCTTCTGATCTACGCAGCGTCCTCCCTGCAATCCGGG |
| | | GTCCCATCTCGGTTCTCCGGCTCGGGCAGCGGTACCGACTTCACTCTGACCAT |
| | | CTCGAGCCTGCAGCCGGAGGACTTCGCCACTTACTACTGTCAGCAAAGCTACA |
| | | CCCTCGCGTTTGGCCAGGGCACCAAAGTGGACATCAAGACCACTACCCCAGCA |
| | | CCGAGGCCACCCACCCCGGCTCCTACCATCGCCTCCCAGCCTCTGTCCCTGCG |
| | | TCCGGAGGCATGTAGACCCGCAGCTGGTGGGGCCGTGCATACCCGGGGTCTTG |
| | | ACTTCGCCTGCGATATCTACATTTGGGCCCCTCTGGCTGGTACTTGCGGGGTC |
| | | CTGCTGCTTTCACTCGTGATCACTCTTTACTGTAAGCGCGGTCGGAAGAAGCT |
| | | GCTGTACATCTTTAAGCAACCCTTCATGAGGCCTGTGCAGACTACTCAAGAGG |
| | | AGGACGGCTGTTCATGCCGGTTCCCAGAGGAGGAGGAAGGCGGCTGCGAACTG |
| | | CGCGTGAAATTCAGCCGCAGCGCAGATGCTCCAGCCTACAAGCAGGGGCAGAA |
| | | CCAGCTCTACAACGAACTCAATCTTGGTCGGAGAGAGGAGTACGACGTGCTGG |
| | | ACAAGCGGAGAGGACGGGACCCAGAAATGGGCGGGAAGCCGCGCAGAAAGAAT |
| | | CCCCAAGAGGGCCTGTACAACGAGCTCCAAAAGGATAAGATGGCAGAAGCCTA |
| | | TAGCGAGATTGGTATGAAAGGGGAACGCAGAAGAGGCAAAGGCCACGACGGAC |
| | | TGTACCAGGGACTCAGCACCGCCACCAAGGACACCTATGACGCTCTTCACATG |
| | | CAGGCCCTGCCGCCTCGG |

139110

| | | |
|---|---|---|
| 139110- aa | 50 | QVQLVQSGGGLVKPGGSLRLSCAASGFTFSDYYMSWIRQAPGKGLEWVSYISS |
| ScFv domain | | SGNTIYYADSVKGRFTISRDNAKNSLYLQMNSLRAEDTAVYYCARSTMVREDY |
| | | WGQGTLVTVSSASGGGGSGGRASGGGGSDIVLTQSPLSLPVTLGQPASISCKS |
| | | SESLVHNSGKTYLNWFHQRPGQSPRRLIYEVSNRDSGVPDRFTGSGSGTDFTL |
| | | KISRVEAEDVGVYYCMQGTHWPGTFGQGTKLEIK |
| 139110- nt | 65 | CAAGTGCAACTGGTGCAAAGCGGAGGAGGATTGGTCAAACCCGGAGGAAGCCT |
| ScFv domain | | GAGACTGTCATGCGCGGCCTCTGGATTCACCTTCTCCGATTACTACATGTCAT |
| | | GGATCAGACAGGCCCCGGGGAAGGGCCTCGAATGGGTGTCCTACATCTCGTCC |
| | | TCCGGGAACACCATCTACTACGCCGACAGCGTGAAGGGCCGCTTTACCATTTC |
| | | CCGCGACAACGCAAAGAACTCGCTGTACCTTCAGATGAATTCCCTGCGGGCTG |
| | | AAGATACCGCGGTGTACTATTGCGCCCGGTCCACTATGGTCCGGGAGGACTAC |
| | | TGGGGACAGGGCACACTCGTGACCGTGTCCAGCGCGAGCGGGGGTGGAGGCAG |
| | | CGGTGGACGCGCCTCCGGCGGCGGCGGTTCAGACATCGTGCTGACTCAGTCGC |
| | | CCCTGTCGCTGCCGGTCACCCTGGGCCAACCGGCCTCAATTAGCTGCAAGTCC |
| | | TCGGAGAGCCTGGTGCACAACTCAGGAAAGACTTACCTGAACTGGTTCCATCA |
| | | GCGGCCTGGACAGTCCCCACGGAGGCTCATCTATGAAGTGTCCAACAGGGATT |
| | | CGGGGGTGCCCGACCGCTTCACTGGCTCCGGGTCCGGCACCGACTTCACCTTG |
| | | AAAATCTCCAGAGTGGAAGCCGAGGACGTGGGCGTGTACTACTGTATGCAGGG |
| | | TACCCACTGGCCTGGAACCTTTGGACAAGGAACTAAGCTCGAGATTAAG |
| 139110- aa | 80 | QVQLVQSGGGLVKPGGSLRLSCAASGFTFSDYYMSWIRQAPGKGLEWVSYISS |
| VH | | SGNTIYYADSVKGRFTISRDNAKNSLYLQMNSLRAEDTAVYYCARSTMVREDY |
| | | WGQGTLVTVSS |
| 139110- aa | 95 | DIVLTQSPLSLPVTLGQPASISCKSSESLVHNSGKTYLNWFHQRPGQSPRRLI |
| VL | | YEVSNRDSGVPDRFTGSGSGTDFTLKISRVEAEDVGVYYCMQGTHWPGTFGQG |
| | | TKLEIK |
| 139110- aa | 110 | MALPVTALLLPLALLLHAARPQVQLVQSGGGLVKPGGSLRLSCAASGFTFSDY |
| Full CAR | | YMSWIRQAPGKGLEWVSYISSSGNTIYYADSVKGRFTISRDNAKNSLYLQMNS |
| | | LRAEDTAVYYCARSTMVREDYWGQGTLVTVSSASGGGGSGGRASGGGGSDIVL |
| | | TQSPLSLPVTLGQPASISCKSSESLVHNSGKTYLNWFHQRPGQSPRRLIYEVS |
| | | NRDSGVPDRFTGSGSGTDFTLKISRVEAEDVGVYYCMQGTHWPGTFGQGTKLE |
| | | IKTTTPAPRPPTPAPTIASQPLSLRPEACRPAAGGAVHTRGLDFACDIYIWAP |
| | | LAGTCGVLLLSLVITLYCKRGRKKLLYIFKQPFMRPVQTTQEEDGCSCRFPEE |
| | | EEGGCELRVKFSRSADAPAYKQGQNQLYNELNLGRREEYDVLDKRRGRDPEMG |
| | | GKPRRKNPQEGLYNELQKDKMAEAYSEIGMKGERRRGKGHDGLYQGLSTATKD |
| | | TYDALHMQALPPR |
| 139110- nt | 125 | ATGGCCCTCCCTGTCACCGCCCTGCTGCTTCCGCTGGCTCTTCTGCTCCACGC |
| Full CAR | | CGCTCGGCCCCAAGTGCAACTGGTGCAAAGCGGAGGAGGATTGGTCAAACCCG |
| | | GAGGAAGCCTGAGACTGTCATGCGCGGCCTCTGGATTCACCTTCTCCGATTAC |
| | | TACATGTCATGGATCAGACAGGCCCCGGGGAAGGGCCTCGAATGGGTGTCCTA |
| | | CATCTCGTCCTCCGGGAACACCATCTACTACGCCGACAGCGTGAAGGGCCGCT |
| | | TTACCATTTCCCGCGACAACGCAAAGAACTCGCTGTACCTTCAGATGAATTCC |
| | | CTGCGGGCTGAAGATACCGCGGTGTACTATTGCGCCCGGTCCACTATGGTCCG |
| | | GGAGGACTACTGGGGACAGGGCACACTCGTGACCGTGTCCAGCGCGAGCGGGG |
| | | GTGGAGGCAGCGGTGGACGCGCCTCCGGCGGCGGCGGTTCAGACATCGTGCTG |
| | | ACTCAGTCGCCCCTGTCGCTGCCGGTCACCCTGGGCCAACCGGCCTCAATTAG |
| | | CTGCAAGTCCTCGGAGAGCCTGGTGCACAACTCAGGAAAGACTTACCTGAACT |
| | | GGTTCCATCAGCGGCCTGGACAGTCCCCACGGAGGCTCATCTATGAAGTGTCC |
| | | AACAGGGATTCGGGGGTGCCCGACCGCTTCACTGGCTCCGGGTCCGGCACCGA |
| | | CTTCACCTTGAAAATCTCCAGAGTGGAAGCCGAGGACGTGGGCGTGTACTACT |
| | | GTATGCAGGGTACCCACTGGCCTGGAACCTTTGGACAAGGAACTAAGCTCGAG |
| | | ATTAAGACCACTACCCCAGCACCGAGGCCACCCACCCCGGCTCCTACCATCGC |
| | | CTCCCAGCCTCTGTCCCTGCGTCCGGAGGCATGTAGACCCGCAGCTGGTGGGG |
| | | CCGTGCATACCCGGGGTCTTGACTTCGCCTGCGATATCTACATTTGGGCCCCT |
| | | CTGGCTGGTACTTGCGGGGTCCTGCTGCTTTCACTCGTGATCACTCTTTACTG |
| | | TAAGCGCGGTCGGAAGAAGCTGCTGTACATCTTTAAGCAACCCTTCATGAGGC |
| | | CTGTGCAGACTACTCAAGAGGAGGACGGCTGTTCATGCCGGTTCCCAGAGGAG |
| | | GAGGAAGGCGGCTGCGAACTGCGCGTGAAATTCAGCCGCAGCGCAGATGCTCC |
| | | AGCCTACAAGCAGGGGCAGAACCAGCTCTACAACGAACTCAATCTTGGTCGGA |
| | | GAGAGGAGTACGACGTGCTGGACAAGCGGAGAGGACGGGACCCAGAAATGGGC |
| | | GGGAAGCCGCGCAGAAAGAATCCCCAAGAGGGCCTGTACAACGAGCTCCAAAA |
| | | GGATAAGATGGCAGAAGCCTATAGCGAGATTGGTATGAAAGGGGAACGCAGAA |
| | | GAGGCAAAGGCCACGACGGACTGTACCAGGGACTCAGCACCGCCACCAAGGAC |
| | | ACCTATGACGCTCTTCACATGCAGGCCCTGCCGCCTCGG |

139112

| | | |
|---|---|---|
| 139112- aa | 51 | QVQLVESGGGLVQPGGSLRLSCAVSGFALSNHGMSWVRRAPGKGLEWVSGIVY |
| ScFv domain | | SGSTYYAASVKGRFTISRDNSRNTLYLQMNSLRPEDTAIYYCSAHGGESDVWG |
| | | QGTTVTVSSASGGGGSGGRASGGGGSDIRLTQSPSPLSASVGDRVTITCQASE |
| | | DINKFLNWYHQTPGKAPKLLIYDASTLQTGVPSRFSGSGSGTDFTLTINSLQP |
| | | EDIGTYYCQQYESLPLTFGGGTKVEIK |
| 139112- nt | 66 | CAAGTGCAACTCGTGGAATCTGGTGGAGGACTCGTGCAACCCGGTGGAAGCCT |
| ScFv domain | | TAGGCTGTCGTGCGCCGTCAGCGGGTTTGCTCTGAGCAACCATGGAATGTCCT |
| | | GGGTCCGCCGGGCACCGGGAAAAGGGCTGGAATGGGTGTCCGGCATCGTGTAC |
| | | AGCGGGTCAACCTATTACGCCGCGTCCGTGAAGGGCAGATTCACTATCTCAAG |
| | | AGACAACAGCCGGAACACCCTGTACTTGCAAATGAATTCCCTGCGCCCCGAGG |
| | | ACACCGCCATCTACTACTGCTCCGCCCACGGAGGAGAGTCGGACGTGTGGGGC |
| | | CAGGGAACGACTGTGACTGTGTCCAGCGCATCAGGAGGGGGTGGTTCGGGCGG |
| | | CCGGGCCTCGGGGGGAGGAGGTTCCGACATTCGGCTGACCCAGTCCCCGTCCC |
| | | CACTGTCGGCCTCCGTCGGCGACCGCGTGACCATCACTTGTCAGGCGTCCGAG |
| | | GACATTAACAAGTTCCTGAACTGGTACCACCAGACCCCTGGAAAGGCCCCCAA |
| | | GCTGCTGATCTACGATGCCTCGACCCTTCAAACTGGAGTGCCTAGCCGGTTCT |
| | | CCGGGTCCGGCTCCGGCACTGATTTCACTCTGACCATCAACTCATTGCAGCCG |
| | | GAAGATATCGGGACCTACTATTGCCAGCAGTACGAATCCCTCCCGCTCACATT |
| | | CGGCGGGGGAACCAAGGTCGAGATTAAG |
| 139112- aa | 81 | QVQLVESGGGLVQPGGSLRLSCAVSGFALSNHGMSWVRRAPGKGLEWVSGIVY |
| VH | | SGSTYYAASVKGRFTISRDNSRNTLYLQMNSLRPEDTAIYYCSAHGGESDVWG |
| | | QGTTVTVSS |
| 139112- aa | 96 | DIRLTQSPSPLSASVGDRVTITCQASEDINKFLNWYHQTPGKAPKLLIYDAST |
| VL | | LQTGVPSRFSGSGSGTDFTLTINSLQPEDIGTYYCQQYESLPLTFGGGTKVEI |
| | | K |
| 139112- aa | 111 | MALPVTALLLPLALLLHAARPQVQLVESGGGLVQPGGSLRLSCAVSGFALSNH |
| Full CAR | | GMSWVRRAPGKGLEWVSGIVYSGSTYYAASVKGRFTISRDNSRNTLYLQMNSL |
| | | RPEDTAIYYCSAHGGESDVWGQGTTVTVSSASGGGGSGGRASGGGGSDIRLTQ |
| | | SPSPLSASVGDRVTITCQASEDINKFLNWYHQTPGKAPKLLIYDASTLQTGVP |
| | | SRFSGSGSGTDFTLTINSLQPEDIGTYYCQQYESLPLTFGGGTKVEIKTTTPA |
| | | PRPPTPAPTIASQPLSLRPEACRPAAGGAVHTRGLDFACDIYIWAPLAGTCGV |
| | | LLLSLVITLYCKRGRKKLLYIFKQPFMRPVQTTQEEDGCSCRFPEEEEGGCEL |
| | | RVKFSRSADAPAYKQGQNQLYNELNLGRREEYDVLDKRRGRDPEMGGKPRRKN |
| | | PQEGLYNELQKDKMAEAYSEIGMKGERRRGKGHDGLYQGLSTATKDTYDALHM |
| | | QALPPR |
| 139112- nt | 126 | ATGGCCCTCCCTGTCACCGCCCTGCTGCTTCCGCTGGCTCTTCTGCTCCACGC |
| Full CAR | | CGCTCGGCCCCAAGTGCAACTCGTGGAATCTGGTGGAGGACTCGTGCAACCCG |
| | | GTGGAAGCCTTAGGCTGTCGTGCGCCGTCAGCGGGTTTGCTCTGAGCAACCAT |
| | | GGAATGTCCTGGGTCCGCCGGGCACCGGGAAAAGGGCTGGAATGGGTGTCCGG |
| | | CATCGTGTACAGCGGGTCAACCTATTACGCCGCGTCCGTGAAGGGCAGATTCA |
| | | CTATCTCAAGAGACAACAGCCGGAACACCCTGTACTTGCAAATGAATTCCCTG |
| | | CGCCCCGAGGACACCGCCATCTACTACTGCTCCGCCCACGGAGGAGAGTCGGA |
| | | CGTGTGGGGCCAGGGAACGACTGTGACTGTGTCCAGCGCATCAGGAGGGGGTG |
| | | GTTCGGGCGGCCGGGCCTCGGGGGGAGGAGGTTCCGACATTCGGCTGACCCAG |
| | | TCCCCGTCCCCACTGTCGGCCTCCGTCGGCGACCGCGTGACCATCACTTGTCA |
| | | GGCGTCCGAGGACATTAACAAGTTCCTGAACTGGTACCACCAGACCCCTGGAA |
| | | AGGCCCCCAAGCTGCTGATCTACGATGCCTCGACCCTTCAAACTGGAGTGCCT |
| | | AGCCGGTTCTCCGGGTCCGGCTCCGGCACTGATTTCACTCTGACCATCAACTC |
| | | ATTGCAGCCGGAAGATATCGGGACCTACTATTGCCAGCAGTACGAATCCCTCC |
| | | CGCTCACATTCGGCGGGGGAACCAAGGTCGAGATTAAGACCACTACCCCAGCA |
| | | CCGAGGCCACCCACCCCGGCTCCTACCATCGCCTCCCAGCCTCTGTCCCTGCG |
| | | TCCGGAGGCATGTAGACCCGCAGCTGGTGGGGCCGTGCATACCCGGGGTCTTG |
| | | ACTTCGCCTGCGATATCTACATTTGGGCCCCTCTGGCTGGTACTTGCGGGGTC |
| | | CTGCTGCTTTCACTCGTGATCACTCTTTACTGTAAGCGCGGTCGGAAGAAGCT |
| | | GCTGTACATCTTTAAGCAACCCTTCATGAGGCCTGTGCAGACTACTCAAGAGG |
| | | AGGACGGCTGTTCATGCCGGTTCCCAGAGGAGGAGGAAGGCGGCTGCGAACTG |
| | | CGCGTGAAATTCAGCCGCAGCGCAGATGCTCCAGCCTACAAGCAGGGGCAGAA |
| | | CCAGCTCTACAACGAACTCAATCTTGGTCGGAGAGAGGAGTACGACGTGCTGG |
| | | ACAAGCGGAGAGGACGGGACCCAGAAATGGGCGGGAAGCCGCGCAGAAAGAAT |
| | | CCCCAAGAGGGCCTGTACAACGAGCTCCAAAAGGATAAGATGGCAGAAGCCTA |
| | | TAGCGAGATTGGTATGAAAGGGGAACGCAGAAGAGGCAAAGGCCACGACGGAC |
| | | TGTACCAGGGACTCAGCACCGCCACCAAGGACACCTATGACGCTCTTCACATG |
| | | CAGGCCCTGCCGCCTCGG |

139113

| | | |
|---|---|---|
| 139113- aa | 52 | EVQLVETGGGLVQPGGSLRLSCAVSGFALSNHGMSWVRRAPGKGLEWVSGIVY |
| ScFv domain | | SGSTYYAASVKGRFTISRDNSRNTLYLQMNSLRPEDTAIYYCSAHGGESDVWG |
| | | QGTTVTVSSASGGGGSGGRASGGGGSETTLTQSPATLSVSPGERATLSCRASQ |
| | | SVGSNLAWYQQKPGQGPRLLIYGASTRATGIPARFSGSGSGTEFTLTISSLQP |
| | | EDFAVYYCQQYNDWLPVTFGQGTKVEIK |
| 139113- nt | 67 | GAAGTGCAATTGGTGGAAACTGGAGGAGGACTTGTGCAACCTGGAGGATCATT |
| ScFv domain | | GCGGCTCTCATGCGCTGTCTCCGGCTTCGCCCTGTCAAATCACGGGATGTCGT |
| | | GGGTCAGACGGGCCCCGGGAAAGGGTCTGGAATGGGTGTCGGGGATTGTGTAC |
| | | AGCGGCTCCACCTACTACGCCGCTTCGGTCAAGGGCCGCTTCACTATTTCACG |
| | | GGACAACAGCCGCAACACCCTCTATCTGCAAATGAACTCTCTCCGCCCGGAGG |
| | | ATACCGCCATCTACTACTGCTCCGCACACGGCGGCGAATCCGACGTGTGGGGA |
| | | CAGGGAACCACTGTCACCGTGTCGTCCGCATCCGGTGGCGGAGGATCGGGTGG |
| | | CCGGGCCTCCGGGGGCGGCGGCAGCGAGACTACCCTGACCCAGTCCCCTGCCA |
| | | CTCTGTCCGTGAGCCCGGGAGAGAGAGCCACCCTTAGCTGCCGGGCCAGCCAG |
| | | AGCGTGGGCTCCAACCTGGCCTGGTACCAGCAGAAGCCAGGACAGGGTCCCAG |
| | | GCTGCTGATCTACGGAGCCTCCACTCGCGCGACCGGCATCCCCGCGAGGTTCT |
| | | CCGGGTCGGGTTCCGGGACCGAGTTCACCCTGACCATCTCCTCCCTCCAACCG |
| | | GAGGACTTCGCGGTGTACTACTGTCAGCAGTACAACGATTGGCTGCCCGTGAC |
| | | ATTTGGACAGGGGACGAAGGTGGAAATCAAA |
| 139113- aa | 82 | EVQLVETGGGLVQPGGSLRLSCAVSGFALSNHGMSWVRRAPGKGLEWVSGIVY |
| VH | | SGSTYYAASVKGRFTISRDNSRNTLYLQMNSLRPEDTAIYYCSAHGGESDVWG |
| | | QGTTVTVSS |
| 139113- aa | 97 | ETTLTQSPATLSVSPGERATLSCRASQSVGSNLAWYQQKPGQGPRLLIYGAST |
| VL | | RATGIPARFSGSGSGTEFTLTISSLQPEDFAVYYCQQYNDWLPVTFGQGTKVE |
| | | IK |
| 139113- aa | 112 | MALPVTALLLPLALLLHAARPEVQLVETGGGLVQPGGSLRLSCAVSGFALSNH |
| Full CAR | | GMSWVRRAPGKGLEWVSGIVYSGSTYYAASVKGRFTISRDNSRNTLYLQMNSL |
| | | RPEDTAIYYCSAHGGESDVWGQGTTVTVSSASGGGGSGGRASGGGGSETTLTQ |
| | | SPATLSVSPGERATLSCRASQSVGSNLAWYQQKPGQGPRLLIYGASTRATGIP |
| | | ARFSGSGSGTEFTLTISSLQPEDFAVYYCQQYNDWLPVTFGQGTKVEIKTTTP |
| | | APRPPTPAPTIASQPLSLRPEACRPAAGGAVHTRGLDFACDIYIWAPLAGTCG |
| | | VLLLSLVITLYCKRGRKKLLYIFKQPFMRPVQTTQEEDGCSCRFPEEEEGGCE |
| | | LRVKFSRSADAPAYKQGQNQLYNELNLGRREEYDVLDKRRGRDPEMGGKPRRK |
| | | NPQEGLYNELQKDKMAEAYSEIGMKGERRRGKGHDGLYQGLSTATKDTYDALH |
| | | MQALPPR |
| 139113- nt | 127 | ATGGCCCTCCCTGTCACCGCCCTGCTGCTTCCGCTGGCTCTTCTGCTCCACGC |
| Full CAR | | CGCTCGGCCCGAAGTGCAATTGGTGGAAACTGGAGGAGGACTTGTGCAACCTG |
| | | GAGGATCATTGCGGCTCTCATGCGCTGTCTCCGGCTTCGCCCTGTCAAATCAC |
| | | GGGATGTCGTGGGTCAGACGGGCCCCGGGAAAGGGTCTGGAATGGGTGTCGGG |
| | | GATTGTGTACAGCGGCTCCACCTACTACGCCGCTTCGGTCAAGGGCCGCTTCA |
| | | CTATTTCACGGGACAACAGCCGCAACACCCTCTATCTGCAAATGAACTCTCTC |
| | | CGCCCGGAGGATACCGCCATCTACTACTGCTCCGCACACGGCGGCGAATCCGA |
| | | CGTGTGGGGACAGGGAACCACTGTCACCGTGTCGTCCGCATCCGGTGGCGGAG |
| | | GATCGGGTGGCCGGGCCTCCGGGGGCGGCGGCAGCGAGACTACCCTGACCCAG |
| | | TCCCCTGCCACTCTGTCCGTGAGCCCGGGAGAGAGAGCCACCCTTAGCTGCCG |
| | | GGCCAGCCAGAGCGTGGGCTCCAACCTGGCCTGGTACCAGCAGAAGCCAGGAC |
| | | AGGGTCCCAGGCTGCTGATCTACGGAGCCTCCACTCGCGCGACCGGCATCCCC |
| | | GCGAGGTTCTCCGGGTCGGGTTCCGGGACCGAGTTCACCCTGACCATCTCCTC |
| | | CCTCCAACCGGAGGACTTCGCGGTGTACTACTGTCAGCAGTACAACGATTGGC |
| | | TGCCCGTGACATTTGGACAGGGGACGAAGGTGGAAATCAAAACCACTACCCCA |
| | | GCACCGAGGCCACCCACCCCGGCTCCTACCATCGCCTCCCAGCCTCTGTCCCT |
| | | GCGTCCGGAGGCATGTAGACCCGCAGCTGGTGGGGCCGTGCATACCCGGGGTC |
| | | TTGACTTCGCCTGCGATATCTACATTTGGGCCCCTCTGGCTGGTACTTGCGGG |
| | | GTCCTGCTGCTTTCACTCGTGATCACTCTTTACTGTAAGCGCGGTCGGAAGAA |
| | | GCTGCTGTACATCTTTAAGCAACCCTTCATGAGGCCTGTGCAGACTACTCAAG |
| | | AGGAGGACGGCTGTTCATGCCGGTTCCCAGAGGAGGAGGAAGGCGGCTGCGAA |
| | | CTGCGCGTGAAATTCAGCCGCAGCGCAGATGCTCCAGCCTACAAGCAGGGGCA |
| | | GAACCAGCTCTACAACGAACTCAATCTTGGTCGGAGAGAGGAGTACGACGTGC |
| | | TGGACAAGCGGAGAGGACGGGACCCAGAAATGGGCGGGAAGCCGCGCAGAAAG |
| | | AATCCCCAAGAGGGCCTGTACAACGAGCTCCAAAAGGATAAGATGGCAGAAGC |
| | | CTATAGCGAGATTGGTATGAAAGGGGAACGCAGAAGAGGCAAAGGCCACGACG |
| | | GACTGTACCAGGGACTCAGCACCGCCACCAAGGACACCTATGACGCTCTTCAC |
| | | ATGCAGGCCCTGCCGCCTCGG |

139114

| | | |
|---|---|---|
| 139114- aa | 53 | EVQLVESGGGLVQPGGSLRLSCAVSGFALSNHGMSWVRRAPGKGLEWVSGIVY |
| ScFv domain | | SGSTYYAASVKGRFTISRDNSRNTLYLQMNSLRPEDTAIYYCSAHGGESDVWG |
| | | QGTTVTVSSASGGGGSGGRASGGGGSEIVLTQSPGTLSLSPGERATLSCRASQ |
| | | SIGSSSLAWYQQKPGQAPRLLMYGASSRASGIPDRFSGSGSGTDFTLTISRLE |
| | | PEDFAVYYCQQYAGSPPFTFGQGTKVEIK |
| 139114- nt | 68 | GAAGTGCAATTGGTGGAATCTGGTGGAGGACTTGTGCAACCTGGAGGATCACT |
| ScFv domain | | GAGACTGTCATGCGCGGTGTCCGGTTTTGCCCTGAGCAATCATGGGATGTCGT |
| | | GGGTCCGGCGCGCCCCCGGAAAGGGTCTGGAATGGGTGTCGGGTATCGTCTAC |
| | | TCCGGGAGCACTTACTACGCCGCGAGCGTGAAGGGCCGCTTCACCATTTCCCG |
| | | CGATAACTCCCGCAACACCCTGTACTTGCAAATGAACTCGCTCCGGCCTGAGG |
| | | ACACTGCCATCTACTACTGCTCCGCACACGGAGGAGAATCCGACGTGTGGGGC |
| | | CAGGGAACTACCGTGACCGTCAGCAGCGCCTCCGGCGGCGGGGGCTCAGGCGG |
| | | ACGGGCTAGCGGCGGCGGTGGCTCCGAGATCGTGCTGACCCAGTCGCCTGGCA |
| | | CTCTCTCGCTGAGCCCCGGGGAAAGGGCAACCCTGTCCTGTCGGGCCAGCCAG |
| | | TCCATTGGATCATCCTCCCTCGCCTGGTATCAGCAGAAACCGGGACAGGCTCC |
| | | GCGGCTGCTTATGTATGGGGCCAGCTCAAGAGCCTCCGGCATTCCCGACCGGT |
| | | TCTCCGGGTCCGGTTCCGGCACCGATTTCACCCTGACTATCTCGAGGCTGGAG |
| | | CCAGAGGACTTCGCCGTGTACTACTGCCAGCAGTACGCGGGGTCCCCGCCGTT |
| | | CACGTTCGGACAGGGAACCAAGGTCGAGATCAAG |
| 139114- aa | 83 | EVQLVESGGGLVQPGGSLRLSCAVSGFALSNHGMSWVRRAPGKGLEWVSGIVY |
| VH | | SGSTYYAASVKGRFTISRDNSRNTLYLQMNSLRPEDTAIYYCSAHGGESDVWG |
| | | QGTTVTVSS |
| 139114- aa | 98 | EIVLTQSPGTLSLSPGERATLSCRASQSIGSSSLAWYQQKPGQAPRLLMYGAS |
| VL | | SRASGIPDRFSGSGSGTDFTLTISRLEPEDFAVYYCQQYAGSPPFTFGQGTKV |
| | | EIK |
| 139114- aa | 113 | MALPVTALLLPLALLLHAARPEVQLVESGGGLVQPGGSLRLSCAVSGFALSNH |
| Full CAR | | GMSWVRRAPGKGLEWVSGIVYSGSTYYAASVKGRFTISRDNSRNTLYLQMNSL |
| | | RPEDTAIYYCSAHGGESDVWGQGTTVTVSSASGGGGSGGRASGGGGSEIVLTQ |
| | | SPGTLSLSPGERATLSCRASQSIGSSSLAWYQQKPGQAPRLLMYGASSRASGI |
| | | PDRFSGSGSGTDFTLTISRLEPEDFAVYYCQQYAGSPPFTFGQGTKVEIKTTT |
| | | PAPRPPTPAPTIASQPLSLRPEACRPAAGGAVHTRGLDFACDIYIWAPLAGTC |
| | | GVLLLSLVITLYCKRGRKKLLYIFKQPFMRPVQTTQEEDGCSCRFPEEEEGGC |
| | | ELRVKFSRSADAPAYKQGQNQLYNELNLGRREEYDVLDKRRGRDPEMGGKPRR |
| | | KNPQEGLYNELQKDKMAEAYSEIGMKGERRRGKGHDGLYQGLSTATKDTYDAL |
| | | HMQALPPR |
| 139114- nt | 128 | ATGGCCCTCCCTGTCACCGCCCTGCTGCTTCCGCTGGCTCTTCTGCTCCACGC |
| Full CAR | | CGCTCGGCCCGAAGTGCAATTGGTGGAATCTGGTGGAGGACTTGTGCAACCTG |
| | | GAGGATCACTGAGACTGTCATGCGCGGTGTCCGGTTTTGCCCTGAGCAATCAT |
| | | GGGATGTCGTGGGTCCGGCGCGCCCCCGGAAAGGGTCTGGAATGGGTGTCGGG |
| | | TATCGTCTACTCCGGGAGCACTTACTACGCCGCGAGCGTGAAGGGCCGCTTCA |
| | | CCATTTCCCGCGATAACTCCCGCAACACCCTGTACTTGCAAATGAACTCGCTC |
| | | CGGCCTGAGGACACTGCCATCTACTACTGCTCCGCACACGGAGGAGAATCCGA |
| | | CGTGTGGGGCCAGGGAACTACCGTGACCGTCAGCAGCGCCTCCGGCGGCGGGG |
| | | GCTCAGGCGGACGGGCTAGCGGCGGCGGTGGCTCCGAGATCGTGCTGACCCAG |
| | | TCGCCTGGCACTCTCTCGCTGAGCCCCGGGGAAAGGGCAACCCTGTCCTGTCG |
| | | GGCCAGCCAGTCCATTGGATCATCCTCCCTCGCCTGGTATCAGCAGAAACCGG |
| | | GACAGGCTCCGCGGCTGCTTATGTATGGGGCCAGCTCAAGAGCCTCCGGCATT |
| | | CCCGACCGGTTCTCCGGGTCCGGTTCCGGCACCGATTTCACCCTGACTATCTC |
| | | GAGGCTGGAGCCAGAGGACTTCGCCGTGTACTACTGCCAGCAGTACGCGGGGT |
| | | CCCCGCCGTTCACGTTCGGACAGGGAACCAAGGTCGAGATCAAGACCACTACC |
| | | CCAGCACCGAGGCCACCCACCCCGGCTCCTACCATCGCCTCCCAGCCTCTGTC |
| | | CCTGCGTCCGGAGGCATGTAGACCCGCAGCTGGTGGGGCCGTGCATACCCGGG |
| | | GTCTTGACTTCGCCTGCGATATCTACATTTGGGCCCCTCTGGCTGGTACTTGC |
| | | GGGGTCCTGCTGCTTTCACTCGTGATCACTCTTTACTGTAAGCGCGGTCGGAA |
| | | GAAGCTGCTGTACATCTTTAAGCAACCCTTCATGAGGCCTGTGCAGACTACTC |
| | | AAGAGGAGGACGGCTGTTCATGCCGGTTCCCAGAGGAGGAGGAAGGCGGCTGC |
| | | GAACTGCGCGTGAAATTCAGCCGCAGCGCAGATGCTCCAGCCTACAAGCAGGG |
| | | GCAGAACCAGCTCTACAACGAACTCAATCTTGGTCGGAGAGAGGAGTACGACG |
| | | TGCTGGACAAGCGGAGAGGACGGGACCCAGAAATGGGCGGGAAGCCGCGCAGA |
| | | AAGAATCCCCAAGAGGGCCTGTACAACGAGCTCCAAAAGGATAAGATGGCAGA |
| | | AGCCTATAGCGAGATTGGTATGAAAGGGGAACGCAGAAGAGGCAAAGGCCACG |
| | | ACGGACTGTACCAGGGACTCAGCACCGCCACCAAGGACACCTATGACGCTCTT |
| | | CACATGCAGGCCCTGCCGCCTCGG |

149362

| | | |
|---|---|---|
| 149362-aa | 129 | QVQLQESGPGLVKPSETLSLTCTVSGGSISSSYYYWGWIRQPPGKGLEWIGSI |
| ScFv domain | | YYSGSAYYNPSLKSRVTISVDTSKNQFSLRLSSVTAADTAVYYCARHWQEWPD |
| | | AFDIWGQGTMVTVSSGGGGSGGGGSGGGGSETTLTQSPAFMSATPGDKVIISC |
| | | KASQDIDDAMNWYQQKPGEAPLFIIQSATSPVPGIPPRFSGSGFGTDFSLTIN |
| | | NIESEDAAYYFCLQHDNFPLTFGQGTKLEIK |
| 149362-nt | 150 | CAAGTGCAGCTTCAGGAAAGCGGACCGGGCCTGGTCAAGCCATCCGAAACTCT |
| ScFv domain | | CTCCCTGACTTGCACTGTGTCTGGCGGTTCCATCTCATCGTCGTACTACTACT |
| | | GGGGCTGGATTAGGCAGCCGCCCGGAAAGGGACTGGAGTGGATCGGAAGCATC |
| | | TACTATTCCGGCTCGGCGTACTACAACCCTAGCCTCAAGTCGAGAGTGACCAT |
| | | CTCCGTGGATACCTCCAAGAACCAGTTTTCCCTGCGCCTGAGCTCCGTGACCG |
| | | CCGCTGACACCGCCGTGTACTACTGTGCTCGGCATTGGCAGGAATGGCCCGAT |
| | | GCCTTCGACATTTGGGGCCAGGGCACTATGGTCACTGTGTCATCCGGGGGTGG |
| | | AGGCAGCGGGGGAGGAGGGTCCGGGGGGGGAGGTTCAGAGACAACCTTGACCC |
| | | AGTCACCCGCATTCATGTCCGCCACTCCGGGAGACAAGGTCATCATCTCGTGC |
| | | AAAGCGTCCCAGGATATCGACGATGCCATGAATTGGTACCAGCAGAAGCCTGG |
| | | CGAAGCGCCGCTGTTCATTATCCAATCCGCAACCTCGCCCGTGCCTGGAATCC |
| | | CACCGCGGTTCAGCGGCAGCGGTTTCGGAACCGACTTTTCCCTGACCATTAAC |
| | | AACATTGAGTCCGAGGACGCCGCCTACTACTTCTGCCTGCAACACGACAACTT |
| | | CCCTCTCACGTTCGGCCAGGGAACCAAGCTGGAAATCAAG |
| 149362-aa | 171 | QVQLQESGPGLVKPSETLSLTCTVSGGSISSSYYYWGWIRQPPGKGLEWIGSI |
| VH | | YYSGSAYYNPSLKSRVTISVDTSKNQFSLRLSSVTAADTAVYYCARHWQEWPD |
| | | AFDIWGQGTMVTVSS |
| 149362-aa VL | 192 | ETTLTQSPAFMSATPGDKVIISCKASQDIDDAMNWYQQKPGEAPLFIIQSATS |
| | | PVPGIPPRFSGSGFGTDFSLTINNIESEDAAYYFCLQHDNFPLTFGQGTKLEI |
| | | K |
| 149362-aa | 213 | MALPVTALLLPLALLLHAARPQVQLQESGPGLVKPSETLSLTCTVSGGSISSS |
| Full CAR | | YYYWGWIRQPPGKGLEWIGSIYYSGSAYYNPSLKSRVTISVDTSKNQFSLRLS |
| | | SVTAADTAVYYCARHWQEWPDAFDIWGQGTMVTVSSGGGGSGGGGSGGGGSET |
| | | TLTQSPAFMSATPGDKVIISCKASQDIDDAMNWYQQKPGEAPLFIIQSATSPV |
| | | PGIPPRFSGSGFGTDFSLTINNIESEDAAYYFCLQHDNFPLTFGQGTKLEIKT |
| | | TTPAPRPPTPAPTIASQPLSLRPEACRPAAGGAVHTRGLDFACDIYIWAPLAG |
| | | TCGVLLLSLVITLYCKRGRKKLLYIFKQPFMRPVQTTQEEDGCSCRFPEEEEG |
| | | GCELRVKFSRSADAPAYKQGQNQLYNELNLGRREEYDVLDKRRGRDPEMGGKP |
| | | RRKNPQEGLYNELQKDKMAEAYSEIGMKGERRRGKGHDGLYQGLSTATKDTYD |
| | | ALHMQALPPR |
| 149362-nt | 234 | ATGGCCCTCCCTGTCACCGCCCTGCTGCTTCCGCTGGCTCTTCTGCTCCACGC |
| Full CAR | | CGCTCGGCCCCAAGTGCAGCTTCAGGAAAGCGGACCGGGCCTGGTCAAGCCAT |
| | | CCGAAACTCTCTCCCTGACTTGCACTGTGTCTGGCGGTTCCATCTCATCGTCG |
| | | TACTACTACTGGGGCTGGATTAGGCAGCCGCCCGGAAAGGGACTGGAGTGGAT |
| | | CGGAAGCATCTACTATTCCGGCTCGGCGTACTACAACCCTAGCCTCAAGTCGA |
| | | GAGTGACCATCTCCGTGGATACCTCCAAGAACCAGTTTTCCCTGCGCCTGAGC |
| | | TCCGTGACCGCCGCTGACACCGCCGTGTACTACTGTGCTCGGCATTGGCAGGA |
| | | ATGGCCCGATGCCTTCGACATTTGGGGCCAGGGCACTATGGTCACTGTGTCAT |
| | | CCGGGGGTGGAGGCAGCGGGGGAGGAGGGTCCGGGGGGGGAGGTTCAGAGACA |
| | | ACCTTGACCCAGTCACCCGCATTCATGTCCGCCACTCCGGGAGACAAGGTCAT |
| | | CATCTCGTGCAAAGCGTCCCAGGATATCGACGATGCCATGAATTGGTACCAGC |
| | | AGAAGCCTGGCGAAGCGCCGCTGTTCATTATCCAATCCGCAACCTCGCCCGTG |
| | | CCTGGAATCCCACCGCGGTTCAGCGGCAGCGGTTTCGGAACCGACTTTTCCCT |
| | | GACCATTAACAACATTGAGTCCGAGGACGCCGCCTACTACTTCTGCCTGCAAC |
| | | ACGACAACTTCCCTCTCACGTTCGGCCAGGGAACCAAGCTGGAAATCAAGACC |
| | | ACTACCCCAGCACCGAGGCCACCCACCCCGGCTCCTACCATCGCCTCCCAGCC |
| | | TCTGTCCCTGCGTCCGGAGGCATGTAGACCCGCAGCTGGTGGGGCCGTGCATA |
| | | CCCGGGGTCTTGACTTCGCCTGCGATATCTACATTTGGGCCCCTCTGGCTGGT |
| | | ACTTGCGGGGTCCTGCTGCTTTCACTCGTGATCACTCTTTACTGTAAGCGCGG |
| | | TCGGAAGAAGCTGCTGTACATCTTTAAGCAACCCTTCATGAGGCCTGTGCAGA |
| | | CTACTCAAGAGGAGGACGGCTGTTCATGCCGGTTCCCAGAGGAGGAGGAAGGC |
| | | GGCTGCGAACTGCGCGTGAAATTCAGCCGCAGCGCAGATGCTCCAGCCTACAA |
| | | GCAGGGGCAGAACCAGCTCTACAACGAACTCAATCTTGGTCGGAGAGAGGAGT |
| | | ACGACGTGCTGGACAAGCGGAGAGGACGGGACCCAGAAATGGGCGGGAAGCCG |
| | | CGCAGAAAGAATCCCCAAGAGGGCCTGTACAACGAGCTCCAAAAGGATAAGAT |
| | | GGCAGAAGCCTATAGCGAGATTGGTATGAAAGGGGAACGCAGAAGAGGCAAAG |
| | | GCCACGACGGACTGTACCAGGGACTCAGCACCGCCACCAAGGACACCTATGAC |
| | | GCTCTTCACATGCAGGCCCTGCCGCCTCGG |

149363

| | | |
|---|---|---|
| 149363-aa | 130 | VNLRESGPALVKPTQTLTLTCTFSGFSLRTSGMCVSWIRQPPGKALEWLARID |
| ScFv domain | | WDEDKFYSTSLKTRLTISKDTSDNQVVLRMTNMDPADTATYYCARSGAGGTSA |
| | | TAFDIWGPGTMVTVSSGGGGSGGGGSGGGGSDIQMTQSPSSLSASVGDRVTIT |
| | | CRASQDIYNNLAWFQLKPGSAPRSLMYAANKSQSGVPSRFSGSASGTDFTLTI |
| | | SSLQPEDFATYYCQHYYRFPYSFGQGTKLEIK |
| 149363-nt | 151 | CAAGTCAATCTGCGCGAATCCGGCCCCGCCTTGGTCAAGCCTACCCAGACCCT |
| ScFv domain | | CACTCTGACCTGTACTTTCTCCGGCTTCTCCCTGCGGACTTCCGGGATGTGCG |
| | | TGTCCTGGATCAGACAGCCTCCGGGAAAGGCCCTGGAGTGGCTCGCTCGCATT |
| | | GACTGGGATGAGGACAAGTTCTACTCCACCTCACTCAAGACCAGGCTGACCAT |
| | | CAGCAAAGATACCTCTGACAACCAAGTGGTGCTCCGCATGACCAACATGGACC |
| | | CAGCCGACACTGCCACTTACTACTGCGCGAGGAGCGGAGCGGGCGGAACCTCC |
| | | GCCACCGCCTTCGATATTTGGGGCCCGGGTACCATGGTCACCGTGTCAAGCGG |
| | | AGGAGGGGGGTCCGGGGGCGGCGGTTCCGGGGGAGGCGGATCGGACATTCAGA |
| | | TGACTCAGTCACCATCGTCCCTGAGCGCTAGCGTGGGCGACAGAGTGACAATC |
| | | ACTTGCCGGGCATCCCAGGACATCTATAACAACCTTGCGTGGTTCCAGCTGAA |
| | | GCCTGGTTCCGCACCGCGGTCACTTATGTACGCCGCCAACAAGAGCCAGTCGG |
| | | GAGTGCCGTCCCGGTTTTCCGGTTCGGCCTCGGGAACTGACTTCACCCTGACG |
| | | ATCTCCAGCCTGCAACCCGAGGATTTCGCCACCTACTACTGCCAGCACTACTA |
| | | CCGCTTTCCCTACTCGTTCGGACAGGGAACCAAGCTGGAAATCAAG |
| 149363-aa | 172 | QVNLRESGPALVKPTQTLTLTCTFSGFSLRTSGMCVSWIRQPPGKALEWLARI |
| VH | | DWDEDKFYSTSLKTRLTISKDTSDNQVVLRMTNMDPADTATYYCARSGAGGTS |
| | | ATAFDIWGPGTMVTVSS |
| 149363-aa VL | 193 | DIQMTQSPSSLSASVGDRVTITCRASQDIYNNLAWFQLKPGSAPRSLMYAANK |
| | | SQSGVPSRFSGSASGTDFTLTISSLQPEDFATYYCQHYYRFPYSFGQGTKLEI |
| | | K |
| 149363-aa | 214 | MALPVTALLLPLALLLHAARPQVNLRESGPALVKPTQTLTLTCTFSGFSLRTS |
| Full CAR | | GMCVSWIRQPPGKALEWLARIDWDEDKFYSTSLKTRLTISKDTSDNQVVLRMT |
| | | NMDPADTATYYCARSGAGGTSATAFDIWGPGTMVTVSSGGGGSGGGGSGGGGS |
| | | DIQMTQSPSSLSASVGDRVTITCRASQDIYNNLAWFQLKPGSAPRSLMYAANK |
| | | SQSGVPSRFSGSASGTDFTLTISSLQPEDFATYYCQHYYRFPYSFGQGTKLEI |
| | | KTTTPAPRPPTPAPTIASQPLSLRPEACRPAAGGAVHTRGLDFACDIYIWAPL |
| | | AGTCGVLLLSLVITLYCKRGRKKLLYIFKQPFMRPVQTTQEEDGCSCRFPEEE |
| | | EGGCELRVKFSRSADAPAYKQGQNQLYNELNLGRREEYDVLDKRRGRDPEMGG |
| | | KPRRKNPQEGLYNELQKDKMAEAYSEIGMKGERRRGKGHDGLYQGLSTATKDT |
| | | YDALHMQALPPR |
| 149363-nt | 235 | ATGGCCCTCCCTGTCACCGCCCTGCTGCTTCCGCTGGCTCTTCTGCTCCACGC |
| Full CAR | | CGCTCGGCCCCAAGTCAATCTGCGCGAATCCGGCCCCGCCTTGGTCAAGCCTA |
| | | CCCAGACCCTCACTCTGACCTGTACTTTCTCCGGCTTCTCCCTGCGGACTTCC |
| | | GGGATGTGCGTGTCCTGGATCAGACAGCCTCCGGGAAAGGCCCTGGAGTGGCT |
| | | CGCTCGCATTGACTGGGATGAGGACAAGTTCTACTCCACCTCACTCAAGACCA |
| | | GGCTGACCATCAGCAAAGATACCTCTGACAACCAAGTGGTGCTCCGCATGACC |
| | | AACATGGACCCAGCCGACACTGCCACTTACTACTGCGCGAGGAGCGGAGCGGG |
| | | CGGAACCTCCGCCACCGCCTTCGATATTTGGGGCCCGGGTACCATGGTCACCG |
| | | TGTCAAGCGGAGGAGGGGGGTCCGGGGGCGGCGGTTCCGGGGGAGGCGGATCG |
| | | GACATTCAGATGACTCAGTCACCATCGTCCCTGAGCGCTAGCGTGGGCGACAG |
| | | AGTGACAATCACTTGCCGGGCATCCCAGGACATCTATAACAACCTTGCGTGGT |
| | | TCCAGCTGAAGCCTGGTTCCGCACCGCGGTCACTTATGTACGCCGCCAACAAG |
| | | AGCCAGTCGGGAGTGCCGTCCCGGTTTTCCGGTTCGGCCTCGGGAACTGACTT |
| | | CACCCTGACGATCTCCAGCCTGCAACCCGAGGATTTCGCCACCTACTACTGCC |
| | | AGCACTACTACCGCTTTCCCTACTCGTTCGGACAGGGAACCAAGCTGGAAATC |
| | | AAGACCACTACCCCAGCACCGAGGCCACCCACCCCGGCTCCTACCATCGCCTC |
| | | CCAGCCTCTGTCCCTGCGTCCGGAGGCATGTAGACCCGCAGCTGGTGGGGCCG |
| | | TGCATACCCGGGGTCTTGACTTCGCCTGCGATATCTACATTTGGGCCCCTCTG |
| | | GCTGGTACTTGCGGGGTCCTGCTGCTTTCACTCGTGATCACTCTTTACTGTAA |
| | | GCGCGGTCGGAAGAAGCTGCTGTACATCTTTAAGCAACCCTTCATGAGGCCTG |
| | | TGCAGACTACTCAAGAGGAGGACGGCTGTTCATGCCGGTTCCCAGAGGAGGAG |
| | | GAAGGCGGCTGCGAACTGCGCGTGAAATTCAGCCGCAGCGCAGATGCTCCAGC |
| | | CTACAAGCAGGGGCAGAACCAGCTCTACAACGAACTCAATCTTGGTCGGAGAG |
| | | AGGAGTACGACGTGCTGGACAAGCGGAGAGGACGGGACCCAGAAATGGGCGGG |
| | | AAGCCGCGCAGAAAGAATCCCCAAGAGGGCCTGTACAACGAGCTCCAAAAGGA |
| | | TAAGATGGCAGAAGCCTATAGCGAGATTGGTATGAAAGGGGAACGCAGAAGAG |
| | | GCAAAGGCCACGACGGACTGTACCAGGGACTCAGCACCGCCACCAAGGACACC |
| | | TATGACGCTCTTCACATGCAGGCCCTGCCGCCTCGG |

149364

| | | |
|---|---|---|
| 149364-aa | 131 | EVQLVESGGGLVKPGGSLRLSCAASGFTFSSYSMNWVRQAPGKGLEWVSSISS |
| ScFv domain | | SSSYIYYADSVKGRFTISRDNAKNSLYLQMNSLRAEDTAVYYCAKTIAAVYAF |
| | | DIWGQGTTVTVSSGGGGSGGGGSGGGGSEIVLTQSPLSLPVTPEEPASISCRS |
| | | SQSLLHSNGYNYLDWYLQKPGQSPQLLIYLGSNRASGVPDRFSGSGSGTDFTL |
| | | KISRVEAEDVGVYYCMQALQTPYTFGQGTKLEIK |
| 149364-nt | 152 | GAAGTGCAGCTTGTCGAATCCGGGGGGGGACTGGTCAAGCCGGGCGGATCACT |
| ScFv domain | | GAGACTGTCCTGCGCCGCGAGCGGCTTCACGTTCTCCTCCTACTCCATGAACT |
| | | GGGTCCGCCAAGCCCCCGGGAAGGGACTGGAATGGGTGTCCTCTATCTCCTCG |
| | | TCGTCGTCCTACATCTACTACGCCGACTCCGTGAAGGGAAGATTCACCATTTC |
| | | CCGCGACAACGCAAAGAACTCACTGTACTTGCAAATGAACTCACTCCGGGCCG |
| | | AAGATACTGCTGTGTACTATTGCGCCAAGACTATTGCCGCCGTCTACGCTTTC |
| | | GACATCTGGGGCCAGGGAACCACCGTGACTGTGTCGTCCGGTGGTGGTGGCTC |
| | | GGGCGGAGGAGGAAGCGGCGGCGGGGGGTCCGAGATTGTGCTGACCCAGTCGC |
| | | CACTGAGCCTCCCTGTGACCCCCGAGGAACCCGCCAGCATCAGCTGCCGGTCC |
| | | AGCCAGTCCCTGCTCCACTCCAACGGATACAATTACCTCGATTGGTACCTTCA |
| | | GAAGCCTGGACAAAGCCCGCAGCTGCTCATCTACTTGGGATCAAACCGCGCGT |
| | | CAGGAGTGCCTGACCGGTTCTCCGGCTCGGGCAGCGGTACCGATTTCACCCTG |
| | | AAAATCTCCAGGGTGGAGGCAGAGGACGTGGGAGTGTATTACTGTATGCAGGC |
| | | GCTGCAGACTCCGTACACATTTGGGCAGGGCACCAAGCTGGAGATCAAG |
| 149364-aa | 173 | EVQLVESGGGLVKPGGSLRLSCAASGFTFSSYSMNWVRQAPGKGLEWVSSISS |
| VH | | SSSYIYYADSVKGRFTISRDNAKNSLYLQMNSLRAEDTAVYYCAKTIAAVYAF |
| | | DIWGQGTTVTVSS |
| 149364-aa VL | 194 | EIVLTQSPLSLPVTPEEPASISCRSSQSLLHSNGYNYLDWYLQKPGQSPQLLI |
| | | YLGSNRASGVPDRFSGSGSGTDFTLKISRVEAEDVGVYYCMQALQTPYTFGQG |
| | | TKLEIK |
| 149364-aa | 215 | MALPVTALLLPLALLLHAARPEVQLVESGGGLVKPGGSLRLSCAASGFTFSSY |
| Full CAR | | SMNWVRQAPGKGLEWVSSISSSSSYIYYADSVKGRFTISRDNAKNSLYLQMNS |
| | | LRAEDTAVYYCAKTIAAVYAFDIWGQGTTVTVSSGGGGSGGGGSGGGGSEIVL |
| | | TQSPLSLPVTPEEPASISCRSSQSLLHSNGYNYLDWYLQKPGQSPQLLIYLGS |
| | | NRASGVPDRFSGSGSGTDFTLKISRVEAEDVGVYYCMQALQTPYTFGQGTKLE |
| | | IKTTTPAPRPPTPAPTIASQPLSLRPEACRPAAGGAVHTRGLDFACDIYIWAP |
| | | LAGTCGVLLLSLVITLYCKRGRKKLLYIFKQPFMRPVQTTQEEDGCSCRFPEE |
| | | EEGGCELRVKFSRSADAPAYKQGQNQLYNELNLGRREEYDVLDKRRGRDPEMG |
| | | GKPRRKNPQEGLYNELQKDKMAEAYSEIGMKGERRRGKGHDGLYQGLSTATKD |
| | | TYDALHMQALPPR |
| 149364-nt | 236 | ATGGCCCTCCCTGTCACCGCCCTGCTGCTTCCGCTGGCTCTTCTGCTCCACGC |
| Full CAR | | CGCTCGGCCCGAAGTGCAGCTTGTCGAATCCGGGGGGGGACTGGTCAAGCCGG |
| | | GCGGATCACTGAGACTGTCCTGCGCCGCGAGCGGCTTCACGTTCTCCTCCTAC |
| | | TCCATGAACTGGGTCCGCCAAGCCCCCGGGAAGGGACTGGAATGGGTGTCCTC |
| | | TATCTCCTCGTCGTCGTCCTACATCTACTACGCCGACTCCGTGAAGGGAAGAT |
| | | TCACCATTTCCCGCGACAACGCAAAGAACTCACTGTACTTGCAAATGAACTCA |
| | | CTCCGGGCCGAAGATACTGCTGTGTACTATTGCGCCAAGACTATTGCCGCCGT |
| | | CTACGCTTTCGACATCTGGGGCCAGGGAACCACCGTGACTGTGTCGTCCGGTG |
| | | GTGGTGGCTCGGGCGGAGGAGGAAGCGGCGGCGGGGGGTCCGAGATTGTGCTG |
| | | ACCCAGTCGCCACTGAGCCTCCCTGTGACCCCCGAGGAACCCGCCAGCATCAG |
| | | CTGCCGGTCCAGCCAGTCCCTGCTCCACTCCAACGGATACAATTACCTCGATT |
| | | GGTACCTTCAGAAGCCTGGACAAAGCCCGCAGCTGCTCATCTACTTGGGATCA |
| | | AACCGCGCGTCAGGAGTGCCTGACCGGTTCTCCGGCTCGGGCAGCGGTACCGA |
| | | TTTCACCCTGAAAATCTCCAGGGTGGAGGCAGAGGACGTGGGAGTGTATTACT |
| | | GTATGCAGGCGCTGCAGACTCCGTACACATTTGGGCAGGGCACCAAGCTGGAG |
| | | ATCAAGACCACTACCCCAGCACCGAGGCCACCCACCCCGGCTCCTACCATCGC |
| | | CTCCCAGCCTCTGTCCCTGCGTCCGGAGGCATGTAGACCCGCAGCTGGTGGGG |
| | | CCGTGCATACCCGGGGTCTTGACTTCGCCTGCGATATCTACATTTGGGCCCCT |
| | | CTGGCTGGTACTTGCGGGGTCCTGCTGCTTTCACTCGTGATCACTCTTTACTG |
| | | TAAGCGCGGTCGGAAGAAGCTGCTGTACATCTTTAAGCAACCCTTCATGAGGC |
| | | CTGTGCAGACTACTCAAGAGGAGGACGGCTGTTCATGCCGGTTCCCAGAGGAG |
| | | GAGGAAGGCGGCTGCGAACTGCGCGTGAAATTCAGCCGCAGCGCAGATGCTCC |
| | | AGCCTACAAGCAGGGGCAGAACCAGCTCTACAACGAACTCAATCTTGGTCGGA |
| | | GAGAGGAGTACGACGTGCTGGACAAGCGGAGAGGACGGGACCCAGAAATGGGC |
| | | GGGAAGCCGCGCAGAAAGAATCCCCAAGAGGGCCTGTACAACGAGCTCCAAAA |
| | | GGATAAGATGGCAGAAGCCTATAGCGAGATTGGTATGAAAGGGGAACGCAGAA |
| | | GAGGCAAAGGCCACGACGGACTGTACCAGGGACTCAGCACCGCCACCAAGGAC |
| | | ACCTATGACGCTCTTCACATGCAGGCCCTGCCGCCTCGG |

149365

| | | |
|---|---|---|
| 149365-aa | 132 | EVQLVESGGGLVKPGGSLRLSCAASGFTFSDYYMSWIRQAPGKGLEWVSYISS |
| ScFv domain | | SGSTIYYADSVKGRFTISRDNAKNSLYLQMNSLRAEDTAVYYCARDLRGAFDI |
| | | WGQGTMVTVSSGGGGSGGGGSGGGGSSYVLTQSPSVSAAPGYTATISCGGNNI |
| | | GTKSVHWYQQKPGQAPLLVIRDDSVRPSKIPGRFSGSNSGNMATLTISGVQAG |
| | | DEADFYCQVWDSDSEHVVFGGGTKLTVL |
| 149365-nt | 153 | GAAGTCCAGCTCGTGGAGTCCGGCGGAGGCCTTGTGAAGCCTGGAGGTTCGCT |
| ScFv domain | | GAGACTGTCCTGCGCCGCCTCCGGCTTCACCTTCTCCGACTACTACATGTCCT |
| | | GGATCAGACAGGCCCCGGGAAAGGGCCTGGAATGGGTGTCCTACATCTCGTCA |
| | | TCGGGCAGCACTATCTACTACGCGGACTCAGTGAAGGGGCGGTTCACCATTTC |
| | | CCGGGATAACGCGAAGAACTCGCTGTATCTGCAAATGAACTCACTGAGGGCCG |
| | | AGGACACCGCCGTGTACTACTGCGCCCGCGATCTCCGCGGGGCATTTGACATC |
| | | TGGGGACAGGGAACCATGGTCACAGTGTCCAGCGGAGGGGGAGGATCGGGTGG |
| | | CGGAGGTTCCGGGGGTGGAGGCTCCTCCTACGTGCTGACTCAGAGCCCAAGCG |
| | | TCAGCGCTGCGCCCGGTTACACGGCAACCATCTCCTGTGGCGGAAACAACATT |
| | | GGGACCAAGTCTGTGCACTGGTATCAGCAGAAGCCGGGCCAAGCTCCCCTGTT |
| | | GGTGATCCGCGATGACTCCGTGCGGCCTAGCAAAATTCCGGGACGGTTCTCCG |
| | | GCTCCAACAGCGGCAATATGGCCACTCTCACCATCTCGGGAGTGCAGGCCGGA |
| | | GATGAAGCCGACTTCTACTGCCAAGTCTGGGACTCAGACTCCGAGCATGTGGT |
| | | GTTCGGGGGCGGAACCAAGCTGACTGTGCTC |
| 149365-aa | 174 | EVQLVESGGGLVKPGGSLRLSCAASGFTFSDYYMSWIRQAPGKGLEWVSYISS |
| VH | | SGSTIYYADSVKGRFTISRDNAKNSLYLQMNSLRAEDTAVYYCARDLRGAFDI |
| | | WGQGTMVTVSS |
| 149365-aa VL | 195 | SYVLTQSPSVSAAPGYTATISCGGNNIGTKSVHWYQQKPGQAPLLVIRDDSVR |
| | | PSKIPGRFSGSNSGNMATLTISGVQAGDEADFYCQVWDSDSEHVVFGGGTKLT |
| | | VL |
| 149365-aa | 216 | MALPVTALLLPLALLLHAARPEVQLVESGGGLVKPGGSLRLSCAASGFTFSDY |
| Full CAR | | YMSWIRQAPGKGLEWVSYISSSGSTIYYADSVKGRFTISRDNAKNSLYLQMNS |
| | | LRAEDTAVYYCARDLRGAFDIWGQGTMVTVSSGGGGSGGGGSGGGGSSYVLTQ |
| | | SPSVSAAPGYTATISCGGNNIGTKSVHWYQQKPGQAPLLVIRDDSVRPSKIPG |
| | | RFSGSNSGNMATLTISGVQAGDEADFYCQVWDSDSEHVVFGGGTKLTVLTTTP |
| | | APRPPTPAPTIASQPLSLRPEACRPAAGGAVHTRGLDFACDIYIWAPLAGTCG |
| | | VLLLSLVITLYCKRGRKKLLYIFKQPFMRPVQTTQEEDGCSCRFPEEEEGGCE |
| | | LRVKFSRSADAPAYKQGQNQLYNELNLGRREEYDVLDKRRGRDPEMGGKPRRK |
| | | NPQEGLYNELQKDKMAEAYSEIGMKGERRRGKGHDGLYQGLSTATKDTYDALH |
| | | MQALPPR |
| 149365-nt | 237 | ATGGCCCTCCCTGTCACCGCCCTGCTGCTTCCGCTGGCTCTTCTGCTCCACGC |
| Full CAR | | CGCTCGGCCCGAAGTCCAGCTCGTGGAGTCCGGCGGAGGCCTTGTGAAGCCTG |
| | | GAGGTTCGCTGAGACTGTCCTGCGCCGCCTCCGGCTTCACCTTCTCCGACTAC |
| | | TACATGTCCTGGATCAGACAGGCCCCGGGAAAGGGCCTGGAATGGGTGTCCTA |
| | | CATCTCGTCATCGGGCAGCACTATCTACTACGCGGACTCAGTGAAGGGGCGGT |
| | | TCACCATTTCCCGGGATAACGCGAAGAACTCGCTGTATCTGCAAATGAACTCA |
| | | CTGAGGGCCGAGGACACCGCCGTGTACTACTGCGCCCGCGATCTCCGCGGGGC |
| | | ATTTGACATCTGGGGACAGGGAACCATGGTCACAGTGTCCAGCGGAGGGGGAG |
| | | GATCGGGTGGCGGAGGTTCCGGGGGTGGAGGCTCCTCCTACGTGCTGACTCAG |
| | | AGCCCAAGCGTCAGCGCTGCGCCCGGTTACACGGCAACCATCTCCTGTGGCGG |
| | | AAACAACATTGGGACCAAGTCTGTGCACTGGTATCAGCAGAAGCCGGGCCAAG |
| | | CTCCCCTGTTGGTGATCCGCGATGACTCCGTGCGGCCTAGCAAAATTCCGGGA |
| | | CGGTTCTCCGGCTCCAACAGCGGCAATATGGCCACTCTCACCATCTCGGGAGT |
| | | GCAGGCCGGAGATGAAGCCGACTTCTACTGCCAAGTCTGGGACTCAGACTCCG |
| | | AGCATGTGGTGTTCGGGGGCGGAACCAAGCTGACTGTGCTCACCACTACCCCA |
| | | GCACCGAGGCCACCCACCCCGGCTCCTACCATCGCCTCCCAGCCTCTGTCCCT |
| | | GCGTCCGGAGGCATGTAGACCCGCAGCTGGTGGGGCCGTGCATACCCGGGGTC |
| | | TTGACTTCGCCTGCGATATCTACATTTGGGCCCCTCTGGCTGGTACTTGCGGG |
| | | GTCCTGCTGCTTTCACTCGTGATCACTCTTTACTGTAAGCGCGGTCGGAAGAA |
| | | GCTGCTGTACATCTTTAAGCAACCCTTCATGAGGCCTGTGCAGACTACTCAAG |
| | | AGGAGGACGGCTGTTCATGCCGGTTCCCAGAGGAGGAGGAAGGCGGCTGCGAA |
| | | CTGCGCGTGAAATTCAGCCGCAGCGCAGATGCTCCAGCCTACAAGCAGGGGCA |
| | | GAACCAGCTCTACAACGAACTCAATCTTGGTCGGAGAGAGGAGTACGACGTGC |
| | | TGGACAAGCGGAGAGGACGGGACCCAGAAATGGGCGGGAAGCCGCGCAGAAAG |
| | | AATCCCCAAGAGGGCCTGTACAACGAGCTCCAAAAGGATAAGATGGCAGAAGC |
| | | CTATAGCGAGATTGGTATGAAAGGGGAACGCAGAAGAGGCAAAGGCCACGACG |
| | | GACTGTACCAGGGACTCAGCACCGCCACCAAGGACACCTATGACGCTCTTCAC |
| | | ATGCAGGCCCTGCCGCCTCGG |

149366

| | | |
|---|---|---|
| 149366-aa | 133 | QVQLVQSGAEVKKPGASVKVSCKPSGYTVTSHYIHWVRRAPGQGLEWMGMINP |
| ScFv domain | | SGGVTAYSQTLQGRVTMTSDTSSSTVYMELSSLRSEDTAMYYCAREGSGSGWY |
| | | FDFWGRGTLVTVSSGGGGSGGGGSGGGGSSYVLTQPPSVSVSPGQTASITCSG |
| | | DGLSKKYVSWYQQKAGQSPVVLISRDKERPSGIPDRFSGSNSADTATLTISGT |
| | | QAMDEADYYCQAWDDTTVVFGGGTKLTVL |
| 149366-nt | 154 | CAAGTGCAGCTGGTGCAGAGCGGGGCCGAAGTCAAGAAGCCGGGAGCCTCCGT |
| ScFv domain | | GAAAGTGTCCTGCAAGCCTTCGGGATACACCGTGACCTCCCACTACATTCATT |
| | | GGGTCCGCCGCGCCCCCGGCCAAGGACTCGAGTGGATGGGCATGATCAACCCT |
| | | AGCGGCGGAGTGACCGCGTACAGCCAGACGCTGCAGGGACGCGTGACTATGAC |
| | | CTCGGATACCTCCTCCTCCACCGTCTATATGGAACTGTCCAGCCTGCGGTCCG |
| | | AGGATACCGCCATGTACTACTGCGCCCGGGAAGGATCAGGCTCCGGGTGGTAT |
| | | TTCGACTTCTGGGGAAGAGGCACCCTCGTGACTGTGTCATCTGGGGGAGGGGG |
| | | TTCCGGTGGTGGCGGATCGGGAGGAGGCGGTTCATCCTACGTGCTGACCCAGC |
| | | CACCCTCCGTGTCCGTGAGCCCCGGCCAGACTGCATCGATTACATGTAGCGGC |
| | | GACGGCCTCTCCAAGAAATACGTGTCGTGGTACCAGCAGAAGGCCGGACAGAG |
| | | CCCGGTGGTGCTGATCTCAAGAGATAAGGAGCGGCCTAGCGGAATCCCGGACA |
| | | GGTTCTCGGGTTCCAACTCCGCGGACACTGCTACTCTGACCATCTCGGGGACC |
| | | CAGGCTATGGACGAAGCCGATTACTACTGCCAAGCCTGGGACGACACTACTGT |
| | | CGTGTTTGGAGGGGGCACCAAGTTGACCGTCCTT |
| 149366-aa | 175 | QVQLVQSGAEVKKPGASVKVSCKPSGYTVTSHYIHWVRRAPGQGLEWMGMINP |
| VH | | SGGVTAYSQTLQGRVTMTSDTSSSTVYMELSSLRSEDTAMYYCAREGSGSGWY |
| | | FDFWGRGTLVTVSS |
| 149366-aa VL | 196 | SYVLTQPPSVSVSPGQTASITCSGDGLSKKYVSWYQQKAGQSPVVLISRDKER |
| | | PSGIPDRFSGSNSADTATLTISGTQAMDEADYYCQAWDDTTVVFGGGTKLTVL |
| 149366-aa | 217 | MALPVTALLLPLALLLHAARPQVQLVQSGAEVKKPGASVKVSCKPSGYTVTSH |
| Full CAR | | YIHWVRRAPGQGLEWMGMINPSGGVTAYSQTLQGRVTMTSDTSSSTVYMELSS |
| | | LRSEDTAMYYCAREGSGSGWYFDFWGRGTLVTVSSGGGGSGGGGSGGGGSSYV |
| | | LTQPPSVSVSPGQTASITCSGDGLSKKYVSWYQQKAGQSPVVLISRDKERPSG |
| | | IPDRFSGSNSADTATLTISGTQAMDEADYYCQAWDDTTVVFGGGTKLTVLTTT |
| | | PAPRPPTPAPTIASQPLSLRPEACRPAAGGAVHTRGLDFACDIYIWAPLAGTC |
| | | GVLLLSLVITLYCKRGRKKLLYIFKQPFMRPVQTTQEEDGCSCRFPEEEEGGC |
| | | ELRVKFSRSADAPAYKQGQNQLYNELNLGRREEYDVLDKRRGRDPEMGGKPRR |
| | | KNPQEGLYNELQKDKMAEAYSEIGMKGERRRGKGHDGLYQGLSTATKDTYDAL |
| | | HMQALPPR |
| 149366-nt | 238 | ATGGCCCTCCCTGTCACCGCCCTGCTGCTTCCGCTGGCTCTTCTGCTCCACGC |
| Full CAR | | CGCTCGGCCCCAAGTGCAGCTGGTGCAGAGCGGGGCCGAAGTCAAGAAGCCGG |
| | | GAGCCTCCGTGAAAGTGTCCTGCAAGCCTTCGGGATACACCGTGACCTCCCAC |
| | | TACATTCATTGGGTCCGCCGCGCCCCCGGCCAAGGACTCGAGTGGATGGGCAT |
| | | GATCAACCCTAGCGGCGGAGTGACCGCGTACAGCCAGACGCTGCAGGGACGCG |
| | | TGACTATGACCTCGGATACCTCCTCCTCCACCGTCTATATGGAACTGTCCAGC |
| | | CTGCGGTCCGAGGATACCGCCATGTACTACTGCGCCCGGGAAGGATCAGGCTC |
| | | CGGGTGGTATTTCGACTTCTGGGGAAGAGGCACCCTCGTGACTGTGTCATCTG |
| | | GGGGAGGGGGTTCCGGTGGTGGCGGATCGGGAGGAGGCGGTTCATCCTACGTG |
| | | CTGACCCAGCCACCCTCCGTGTCCGTGAGCCCCGGCCAGACTGCATCGATTAC |
| | | ATGTAGCGGCGACGGCCTCTCCAAGAAATACGTGTCGTGGTACCAGCAGAAGG |
| | | CCGGACAGAGCCCGGTGGTGCTGATCTCAAGAGATAAGGAGCGGCCTAGCGGA |
| | | ATCCCGGACAGGTTCTCGGGTTCCAACTCCGCGGACACTGCTACTCTGACCAT |
| | | CTCGGGGACCCAGGCTATGGACGAAGCCGATTACTACTGCCAAGCCTGGGACG |
| | | ACACTACTGTCGTGTTTGGAGGGGGCACCAAGTTGACCGTCCTTACCACTACC |
| | | CCAGCACCGAGGCCACCCACCCCGGCTCCTACCATCGCCTCCCAGCCTCTGTC |
| | | CCTGCGTCCGGAGGCATGTAGACCCGCAGCTGGTGGGGCCGTGCATACCCGGG |
| | | GTCTTGACTTCGCCTGCGATATCTACATTTGGGCCCCTCTGGCTGGTACTTGC |
| | | GGGGTCCTGCTGCTTTCACTCGTGATCACTCTTTACTGTAAGCGCGGTCGGAA |
| | | GAAGCTGCTGTACATCTTTAAGCAACCCTTCATGAGGCCTGTGCAGACTACTC |
| | | AAGAGGAGGACGGCTGTTCATGCCGGTTCCCAGAGGAGGAGGAAGGCGGCTGC |
| | | GAACTGCGCGTGAAATTCAGCCGCAGCGCAGATGCTCCAGCCTACAAGCAGGG |
| | | GCAGAACCAGCTCTACAACGAACTCAATCTTGGTCGGAGAGAGGAGTACGACG |
| | | TGCTGGACAAGCGGAGAGGACGGGACCCAGAAATGGGCGGGAAGCCGCGCAGA |
| | | AAGAATCCCCAAGAGGGCCTGTACAACGAGCTCCAAAAGGATAAGATGGCAGA |
| | | AGCCTATAGCGAGATTGGTATGAAAGGGGAACGCAGAAGAGGCAAAGGCCACG |
| | | ACGGACTGTACCAGGGACTCAGCACCGCCACCAAGGACACCTATGACGCTCTT |
| | | CACATGCAGGCCCTGCCGCCTCGG |

149367

| | | |
|---|---|---|
| 149367-aa | 134 | QVQLQESGPGLVKPSQTLSLTCTVSGGSISSGGYYWSWIRQHPGKGLEWIGYI |
| ScFv domain | | YYSGSTYYNPSLKSRVTISVDTSKNQFSLKLSSVTAADTAVYYCARAGIAARL |
| | | RGAFDIWGQGTMVTVSSGGGGSGGGGSGGGGSDIVMTQSPSSVSASVGDRVII |
| | | TCRASQGIRNWLAWYQQKPGKAPNLLIYAASNLQSGVPSRFSGSGSGADFTLT |
| | | ISSLQPEDVATYYCQKYNSAPFTFGPGTKVDIK |
| 149367-nt | 155 | CAAGTGCAGCTTCAGGAGAGCGGCCCGGGACTCGTGAAGCCGTCCCAGACCCT |
| ScFv domain | | GTCCCTGACTTGCACCGTGTCGGGAGGAAGCATCTCGAGCGGAGGCTACTATT |
| | | GGTCGTGGATTCGGCAGCACCCTGGAAAGGGCCTGGAATGGATCGGCTACATC |
| | | TACTACTCCGGCTCGACCTACTACAACCCATCGCTGAAGTCCAGAGTGACAAT |
| | | CTCAGTGGACACGTCCAAGAATCAGTTCAGCCTGAAGCTCTCTTCCGTGACTG |
| | | CGGCCGACACCGCCGTGTACTACTGCGCACGCGCTGGAATTGCCGCCCGGCTG |
| | | AGGGGTGCCTTCGACATTTGGGGACAGGGCACCATGGTCACCGTGTCCTCCGG |
| | | CGGCGGAGGTTCCGGGGGTGGAGGCTCAGGAGGAGGGGGGTCCGACATCGTCA |
| | | TGACTCAGTCGCCCTCAAGCGTCAGCGCGTCCGTCGGGGACAGAGTGATCATC |
| | | ACCTGTCGGGCGTCCCAGGGAATTCGCAACTGGCTGGCCTGGTATCAGCAGAA |
| | | GCCCGGAAAGGCCCCCAACCTGTTGATCTACGCCGCCTCAAACCTCCAATCCG |
| | | GGGTGCCGAGCCGCTTCAGCGGCTCCGGTTCGGGTGCCGATTTCACTCTGACC |
| | | ATCTCCTCCCTGCAACCTGAAGATGTGGCTACCTACTACTGCCAAAAGTACAA |
| | | CTCCGCACCTTTTACTTTCGGACCGGGGACCAAAGTGGACATTAAG |
| 149367-aa | 176 | QVQLQESGPGLVKPSQTLSLTCTVSGGSISSGGYYWSWIRQHPGKGLEWIGYI |
| VH | | YYSGSTYYNPSLKSRVTISVDTSKNQFSLKLSSVTAADTAVYYCARAGIAARL |
| | | RGAFDIWGQGTMVTVSS |
| 149367-aa VL | 197 | DIVMTQSPSSVSASVGDRVIITCRASQGIRNWLAWYQQKPGKAPNLLIYAASN |
| | | LQSGVPSRFSGSGSGADFTLTISSLQPEDVATYYCQKYNSAPFTFGPGTKVDI |
| | | K |
| 149367-aa | 218 | MALPVTALLLPLALLLHAARPQVQLQESGPGLVKPSQTLSLTCTVSGGSISSG |
| Full CAR | | GYYWSWIRQHPGKGLEWIGYIYYSGSTYYNPSLKSRVTISVDTSKNQFSLKLS |
| | | SVTAADTAVYYCARAGIAARLRGAFDIWGQGTMVTVSSGGGGSGGGGSGGGGS |
| | | DIVMTQSPSSVSASVGDRVIITCRASQGIRNWLAWYQQKPGKAPNLLIYAASN |
| | | LQSGVPSRFSGSGSGADFTLTISSLQPEDVATYYCQKYNSAPFTFGPGTKVDI |
| | | KTTTPAPRPPTPAPTIASQPLSLRPEACRPAAGGAVHTRGLDFACDIYIWAPL |
| | | AGTCGVLLLSLVITLYCKRGRKKLLYIFKQPFMRPVQTTQEEDGCSCRFPEEE |
| | | EGGCELRVKFSRSADAPAYKQGQNQLYNELNLGRREEYDVLDKRRGRDPEMGG |
| | | KPRRKNPQEGLYNELQKDKMAEAYSEIGMKGERRRGKGHDGLYQGLSTATKDT |
| | | YDALHMQALPPR |
| 149367-nt | 239 | ATGGCCCTCCCTGTCACCGCCCTGCTGCTTCCGCTGGCTCTTCTGCTCCACGC |
| Full CAR | | CGCTCGGCCCCAAGTGCAGCTTCAGGAGAGCGGCCCGGGACTCGTGAAGCCGT |
| | | CCCAGACCCTGTCCCTGACTTGCACCGTGTCGGGAGGAAGCATCTCGAGCGGA |
| | | GGCTACTATTGGTCGTGGATTCGGCAGCACCCTGGAAAGGGCCTGGAATGGAT |
| | | CGGCTACATCTACTACTCCGGCTCGACCTACTACAACCCATCGCTGAAGTCCA |
| | | GAGTGACAATCTCAGTGGACACGTCCAAGAATCAGTTCAGCCTGAAGCTCTCT |
| | | TCCGTGACTGCGGCCGACACCGCCGTGTACTACTGCGCACGCGCTGGAATTGC |
| | | CGCCCGGCTGAGGGGTGCCTTCGACATTTGGGGACAGGGCACCATGGTCACCG |
| | | TGTCCTCCGGCGGCGGAGGTTCCGGGGGTGGAGGCTCAGGAGGAGGGGGGTCC |
| | | GACATCGTCATGACTCAGTCGCCCTCAAGCGTCAGCGCGTCCGTCGGGGACAG |
| | | AGTGATCATCACCTGTCGGGCGTCCCAGGGAATTCGCAACTGGCTGGCCTGGT |
| | | ATCAGCAGAAGCCCGGAAAGGCCCCCAACCTGTTGATCTACGCCGCCTCAAAC |
| | | CTCCAATCCGGGGTGCCGAGCCGCTTCAGCGGCTCCGGTTCGGGTGCCGATTT |
| | | CACTCTGACCATCTCCTCCCTGCAACCTGAAGATGTGGCTACCTACTACTGCC |
| | | AAAAGTACAACTCCGCACCTTTTACTTTCGGACCGGGGACCAAAGTGGACATT |
| | | AAGACCACTACCCCAGCACCGAGGCCACCCACCCCGGCTCCTACCATCGCCTC |
| | | CCAGCCTCTGTCCCTGCGTCCGGAGGCATGTAGACCCGCAGCTGGTGGGGCCG |
| | | TGCATACCCGGGGTCTTGACTTCGCCTGCGATATCTACATTTGGGCCCCTCTG |
| | | GCTGGTACTTGCGGGGTCCTGCTGCTTTCACTCGTGATCACTCTTTACTGTAA |
| | | GCGCGGTCGGAAGAAGCTGCTGTACATCTTTAAGCAACCCTTCATGAGGCCTG |
| | | TGCAGACTACTCAAGAGGAGGACGGCTGTTCATGCCGGTTCCCAGAGGAGGAG |
| | | GAAGGCGGCTGCGAACTGCGCGTGAAATTCAGCCGCAGCGCAGATGCTCCAGC |
| | | CTACAAGCAGGGGCAGAACCAGCTCTACAACGAACTCAATCTTGGTCGGAGAG |
| | | AGGAGTACGACGTGCTGGACAAGCGGAGAGGACGGGACCCAGAAATGGGCGGG |
| | | AAGCCGCGCAGAAAGAATCCCCAAGAGGGCCTGTACAACGAGCTCCAAAAGGA |
| | | TAAGATGGCAGAAGCCTATAGCGAGATTGGTATGAAAGGGGAACGCAGAAGAG |
| | | GCAAAGGCCACGACGGACTGTACCAGGGACTCAGCACCGCCACCAAGGACACC |
| | | TATGACGCTCTTCACATGCAGGCCCTGCCGCCTCGG |

149368

| | | |
|---|---|---|
| 149368-aa | 135 | QVQLVQSGAEVKKPGSSVKVSCKASGGTFSSYAISWVRQAPGQGLEWMGGIIP |
| ScFv domain | | IFGTANYAQKFQGRVTITADESTSTAYMELSSLRSEDTAVYYCARRGGYQLLR |
| | | WDVGLLRSAFDIWGQGTMVTVSSGGGGSGGGGSGGGGSSYVLTQPPSVSVAPG |
| | | QTARITCGGNNIGSKSVHWYQQKPGQAPVLVLYGKNNRPSGVPDRFSGSRSGT |
| | | TASLTITGAQAEDEADYYCSSRDSSGDHLRVFGTGTKVTVL |
| 149368-nt | 156 | CAAGTGCAGCTGGTCCAGTCGGGCGCCGAGGTCAAGAAGCCCGGGAGCTCTGT |
| ScFv domain | | GAAAGTGTCCTGCAAGGCCTCCGGGGGCACCTTTAGCTCCTACGCCATCTCCT |
| | | GGGTCCGCCAAGCACCGGGTCAAGGCCTGGAGTGGATGGGGGGAATTATCCCT |
| | | ATCTTCGGCACTGCCAACTACGCCCAGAAGTTCCAGGGACGCGTGACCATTAC |
| | | CGCGGACGAATCCACCTCCACCGCTTATATGGAGCTGTCCAGCTTGCGCTCGG |
| | | AAGATACCGCCGTGTACTACTGCGCCCGGAGGGGTGGATACCAGCTGCTGAGA |
| | | TGGGACGTGGGCCTCCTGCGGTCGGCGTTCGACATCTGGGGCCAGGGCACTAT |
| | | GGTCACTGTGTCCAGCGGAGGAGGCGGATCGGGAGGCGGCGGATCAGGGGGAG |
| | | GCGGTTCCAGCTACGTGCTTACTCAACCCCCTTCGGTGTCCGTGGCCCCGGGA |
| | | CAGACCGCCAGAATCACTTGCGGAGGAAACAACATTGGGTCCAAGAGCGTGCA |
| | | TTGGTACCAGCAGAAGCCAGGACAGGCCCCTGTGCTGGTGCTCTACGGGAAGA |
| | | ACAATCGGCCCAGCGGAGTGCCGGACAGGTTCTCGGGTTCACGCTCCGGTACA |
| | | ACCGCTTCACTGACTATCACCGGGGCCCAGGCAGAGGATGAAGCGGACTACTA |
| | | CTGTTCCTCCCGGGATTCATCCGGCGACCACCTCCGGGTGTTCGGAACCGGAA |
| | | CGAAGGTCACCGTGCTG |
| 149368-aa | 177 | QVQLVQSGAEVKKPGSSVKVSCKASGGTFSSYAISWVRQAPGQGLEWMGGIIP |
| VH | | IFGTANYAQKFQGRVTITADESTSTAYMELSSLRSEDTAVYYCARRGGYQLLR |
| | | WDVGLLRSAFDIWGQGTMVTVSS |
| 149368-aa VL | 198 | SYVLTQPPSVSVAPGQTARITCGGNNIGSKSVHWYQQKPGQAPVLVLYGKNNR |
| | | PSGVPDRFSGSRSGTTASLTITGAQAEDEADYYCSSRDSSGDHLRVFGTGTKV |
| | | TVL |
| 149368-aa | 219 | MALPVTALLLPLALLLHAARPQVQLVQSGAEVKKPGSSVKVSCKASGGTFSSY |
| Full CAR | | AISWVRQAPGQGLEWMGGIIPIFGTANYAQKFQGRVTITADESTSTAYMELSS |
| | | LRSEDTAVYYCARRGGYQLLRWDVGLLRSAFDIWGQGTMVTVSSGGGGSGGGG |
| | | SGGGGSSYVLTQPPSVSVAPGQTARITCGGNNIGSKSVHWYQQKPGQAPVLVL |
| | | YGKNNRPSGVPDRFSGSRSGTTASLTITGAQAEDEADYYCSSRDSSGDHLRVF |
| | | GTGTKVTVLTTTPAPRPPTPAPTIASQPLSLRPEACRPAAGGAVHTRGLDFAC |
| | | DIYIWAPLAGTCGVLLLSLVITLYCKRGRKKLLYIFKQPFMRPVQTTQEEDGC |
| | | SCRFPEEEEGGCELRVKFSRSADAPAYKQGQNQLYNELNLGRREEYDVLDKRR |
| | | GRDPEMGGKPRRKNPQEGLYNELQKDKMAEAYSEIGMKGERRRGKGHDGLYQG |
| | | LSTATKDTYDALHMQALPPR |
| 149368-nt | 240 | ATGGCCCTCCCTGTCACCGCCCTGCTGCTTCCGCTGGCTCTTCTGCTCCACGC |
| Full CAR | | CGCTCGGCCCCAAGTGCAGCTGGTCCAGTCGGGCGCCGAGGTCAAGAAGCCCG |
| | | GGAGCTCTGTGAAAGTGTCCTGCAAGGCCTCCGGGGGCACCTTTAGCTCCTAC |
| | | GCCATCTCCTGGGTCCGCCAAGCACCGGGTCAAGGCCTGGAGTGGATGGGGGG |
| | | AATTATCCCTATCTTCGGCACTGCCAACTACGCCCAGAAGTTCCAGGGACGCG |
| | | TGACCATTACCGCGGACGAATCCACCTCCACCGCTTATATGGAGCTGTCCAGC |
| | | TTGCGCTCGGAAGATACCGCCGTGTACTACTGCGCCCGGAGGGGTGGATACCA |
| | | GCTGCTGAGATGGGACGTGGGCCTCCTGCGGTCGGCGTTCGACATCTGGGGCC |
| | | AGGGCACTATGGTCACTGTGTCCAGCGGAGGAGGCGGATCGGGAGGCGGCGGA |
| | | TCAGGGGGAGGCGGTTCCAGCTACGTGCTTACTCAACCCCCTTCGGTGTCCGT |
| | | GGCCCCGGGACAGACCGCCAGAATCACTTGCGGAGGAAACAACATTGGGTCCA |
| | | AGAGCGTGCATTGGTACCAGCAGAAGCCAGGACAGGCCCCTGTGCTGGTGCTC |
| | | TACGGGAAGAACAATCGGCCCAGCGGAGTGCCGGACAGGTTCTCGGGTTCACG |
| | | CTCCGGTACAACCGCTTCACTGACTATCACCGGGGCCCAGGCAGAGGATGAAG |
| | | CGGACTACTACTGTTCCTCCCGGGATTCATCCGGCGACCACCTCCGGGTGTTC |
| | | GGAACCGGAACGAAGGTCACCGTGCTGACCACTACCCCAGCACCGAGGCCACC |
| | | CACCCCGGCTCCTACCATCGCCTCCCAGCCTCTGTCCCTGCGTCCGGAGGCAT |
| | | GTAGACCCGCAGCTGGTGGGGCCGTGCATACCCGGGGTCTTGACTTCGCCTGC |
| | | GATATCTACATTTGGGCCCCTCTGGCTGGTACTTGCGGGGTCCTGCTGCTTTC |
| | | ACTCGTGATCACTCTTTACTGTAAGCGCGGTCGGAAGAAGCTGCTGTACATCT |
| | | TTAAGCAACCCTTCATGAGGCCTGTGCAGACTACTCAAGAGGAGGACGGCTGT |
| | | TCATGCCGGTTCCCAGAGGAGGAGGAAGGCGGCTGCGAACTGCGCGTGAAATT |
| | | CAGCCGCAGCGCAGATGCTCCAGCCTACAAGCAGGGGCAGAACCAGCTCTACA |
| | | ACGAACTCAATCTTGGTCGGAGAGAGGAGTACGACGTGCTGGACAAGCGGAGA |
| | | GGACGGGACCCAGAAATGGGCGGGAAGCCGCGCAGAAAGAATCCCCAAGAGGG |
| | | CCTGTACAACGAGCTCCAAAAGGATAAGATGGCAGAAGCCTATAGCGAGATTG |
| | | GTATGAAAGGGGAACGCAGAAGAGGCAAAGGCCACGACGGACTGTACCAGGGA |
| | | CTCAGCACCGCCACCAAGGACACCTATGACGCTCTTCACATGCAGGCCCTGCC |
| | | GCCTCGG |

149369

| | | |
|---|---|---|
| 149369-aa | 136 | EVQLQQSGPGLVKPSQTLSLTCAISGDSVSSNSAAWNWIRQSPSRGLEWLGRT |
| ScFv domain | | YYRSKWYSFYAISLKSRIIINPDTSKNQFSLQLKSVTPEDTAVYYCARSSPEG |
| | | LFLYWFDPWGQGTLVTVSSGGDGSGGGGSGGGGSSSELTQDPAVSVALGQTIR |
| | | ITCQGDSLGNYYATWYQQKPGQAPVLVIYGTNNRPSGIPDRFSASSSGNTASL |
| | | TITGAQAEDEADYYCNSRDSSGHHLLFGTGTKVTVL |
| 149369-nt | 157 | GAAGTGCAGCTCCAACAGTCAGGACCGGGGCTCGTGAAGCCATCCCAGACCCT |
| ScFv domain | | GTCCCTGACTTGTGCCATCTCGGGAGATAGCGTGTCATCGAACTCCGCCGCCT |
| | | GGAACTGGATTCGGCAGAGCCCGTCCCGCGGACTGGAGTGGCTTGGAAGGACC |
| | | TACTACCGGTCCAAGTGGTACTCTTTCTACGCGATCTCGCTGAAGTCCCGCAT |
| | | TATCATTAACCCTGATACCTCCAAGAATCAGTTCTCCCTCCAACTGAAATCCG |
| | | TCACCCCCGAGGACACAGCAGTGTATTACTGCGCACGGAGCAGCCCCGAAGGA |
| | | CTGTTCCTGTATTGGTTTGACCCCTGGGGCCAGGGGACTCTTGTGACCGTGTC |
| | | GAGCGGCGGAGATGGGTCCGGTGGCGGTGGTTCGGGGGGCGGCGGATCATCAT |
| | | CCGAACTGACCCAGGACCCGGCTGTGTCCGTGGCGCTGGGACAAACCATCCGC |
| | | ATTACGTGCCAGGGAGACTCCCTGGGCAACTACTACGCCACTTGGTACCAGCA |
| | | GAAGCCGGGCCAAGCCCCTGTGTTGGTCATCTACGGGACCAACAACAGACCTT |
| | | CCGGCATCCCCGACCGGTTCAGCGCTTCGTCCTCCGGCAACACTGCCAGCCTG |
| | | ACCATCACTGGAGCGCAGGCCGAAGATGAGGCCGACTACTACTGCAACAGCAG |
| | | AGACTCCTCGGGTCATCACCTCTTGTTCGGAACTGGAACCAAGGTCACCGTGC |
| | | TG |
| 149369-aa | 178 | EVQLQQSGPGLVKPSQTLSLTCAISGDSVSSNSAAWNWIRQSPSRGLEWLGRT |
| VH | | YYRSKWYSFYAISLKSRIIINPDTSKNQFSLQLKSVTPEDTAVYYCARSSPEG |
| | | LFLYWFDPWGQGTLVTVSS |
| 149369-aa VL | 199 | SSELTQDPAVSVALGQTIRITCQGDSLGNYYATWYQQKPGQAPVLVIYGTNNR |
| | | PSGIPDRFSASSSGNTASLTITGAQAEDEADYYCNSRDSSGHHLLFGTGTKVT |
| | | VL |
| 149369-aa | 220 | MALPVTALLLPLALLLHAARPEVQLQQSGPGLVKPSQTLSLTCAISGDSVSSN |
| Full CAR | | SAAWNWIRQSPSRGLEWLGRTYYRSKWYSFYAISLKSRIIINPDTSKNQFSLQ |
| | | LKSVTPEDTAVYYCARSSPEGLFLYWFDPWGQGTLVTVSSGGDGSGGGGSGGG |
| | | GSSSELTQDPAVSVALGQTIRITCQGDSLGNYYATWYQQKPGQAPVLVIYGTN |
| | | NRPSGIPDRFSASSSGNTASLTITGAQAEDEADYYCNSRDSSGHHLLFGTGTK |
| | | VTVLTTTPAPRPPTPAPTIASQPLSLRPEACRPAAGGAVHTRGLDFACDIYIW |
| | | APLAGTCGVLLLSLVITLYCKRGRKKLLYIFKQPFMRPVQTTQEEDGCSCRFP |
| | | EEEEGGCELRVKFSRSADAPAYKQGQNQLYNELNLGRREEYDVLDKRRGRDPE |
| | | MGGKPRRKNPQEGLYNELQKDKMAEAYSEIGMKGERRRGKGHDGLYQGLSTAT |
| | | KDTYDALHMQALPPR |
| 149369-nt | 241 | ATGGCCCTCCCTGTCACCGCCCTGCTGCTTCCGCTGGCTCTTCTGCTCCACGC |
| Full CAR | | CGCTCGGCCCGAAGTGCAGCTCCAACAGTCAGGACCGGGGCTCGTGAAGCCAT |
| | | CCCAGACCCTGTCCCTGACTTGTGCCATCTCGGGAGATAGCGTGTCATCGAAC |
| | | TCCGCCGCCTGGAACTGGATTCGGCAGAGCCCGTCCCGCGGACTGGAGTGGCT |
| | | TGGAAGGACCTACTACCGGTCCAAGTGGTACTCTTTCTACGCGATCTCGCTGA |
| | | AGTCCCGCATTATCATTAACCCTGATACCTCCAAGAATCAGTTCTCCCTCCAA |
| | | CTGAAATCCGTCACCCCCGAGGACACAGCAGTGTATTACTGCGCACGGAGCAG |
| | | CCCCGAAGGACTGTTCCTGTATTGGTTTGACCCCTGGGGCCAGGGGACTCTTG |
| | | TGACCGTGTCGAGCGGCGGAGATGGGTCCGGTGGCGGTGGTTCGGGGGGCGGC |
| | | GGATCATCATCCGAACTGACCCAGGACCCGGCTGTGTCCGTGGCGCTGGGACA |
| | | AACCATCCGCATTACGTGCCAGGGAGACTCCCTGGGCAACTACTACGCCACTT |
| | | GGTACCAGCAGAAGCCGGGCCAAGCCCCTGTGTTGGTCATCTACGGGACCAAC |
| | | AACAGACCTTCCGGCATCCCCGACCGGTTCAGCGCTTCGTCCTCCGGCAACAC |
| | | TGCCAGCCTGACCATCACTGGAGCGCAGGCCGAAGATGAGGCCGACTACTACT |
| | | GCAACAGCAGAGACTCCTCGGGTCATCACCTCTTGTTCGGAACTGGAACCAAG |
| | | GTCACCGTGCTGACCACTACCCCAGCACCGAGGCCACCCACCCCGGCTCCTAC |
| | | CATCGCCTCCCAGCCTCTGTCCCTGCGTCCGGAGGCATGTAGACCCGCAGCTG |
| | | GTGGGGCCGTGCATACCCGGGGTCTTGACTTCGCCTGCGATATCTACATTTGG |
| | | GCCCCTCTGGCTGGTACTTGCGGGGTCCTGCTGCTTTCACTCGTGATCACTCT |
| | | TTACTGTAAGCGCGGTCGGAAGAAGCTGCTGTACATCTTTAAGCAACCCTTCA |
| | | TGAGGCCTGTGCAGACTACTCAAGAGGAGGACGGCTGTTCATGCCGGTTCCCA |
| | | GAGGAGGAGGAAGGCGGCTGCGAACTGCGCGTGAAATTCAGCCGCAGCGCAGA |
| | | TGCTCCAGCCTACAAGCAGGGGCAGAACCAGCTCTACAACGAACTCAATCTTG |
| | | GTCGGAGAGAGGAGTACGACGTGCTGGACAAGCGGAGAGGACGGGACCCAGAA |
| | | ATGGGCGGGAAGCCGCGCAGAAAGAATCCCCAAGAGGGCCTGTACAACGAGCT |
| | | CCAAAAGGATAAGATGGCAGAAGCCTATAGCGAGATTGGTATGAAAGGGGAAC |
| | | GCAGAAGAGGCAAAGGCCACGACGGACTGTACCAGGGACTCAGCACCGCCACC |
| | | AAGGACACCTATGACGCTCTTCACATGCAGGCCCTGCCGCCTCGG |

BCMA_EBB-C1978-A4

| | | |
|---|---|---|
| BCMA_EBB- | 137 | EVQLVESGGGLVQPGGSLRLSCAASGFTFSSYAMSWVRQAPGKGLEWVSAISG |
| C1978-A4 - | | SGGSTYYADSVKGRFTISRDNSKNTLYLQMNSLRAEDTAVYYCAKVEGSGSLD |
| aa | | YWGQGTLVTVSSGGGGSGGGGSGGGGSEIVMTQSPGTLSLSPGERATLSCRAS |
| ScFv domain | | QSVSSAYLAWYQQKPGQPPRLLISGASTRATGIPDRFGGSGSGTDFTLTISRL |
| | | EPEDFAVYYCQHYGSSFNGSSLFTFGQGTRLEIK |
| BCMA_EBB- | 158 | GAAGTGCAGCTCGTGGAGTCAGGAGGCGGCCTGGTCCAGCCGGGAGGGTCCCT |
| C1978-A4 - nt | | TAGACTGTCATGCGCCGCAAGCGGATTCACTTTCTCCTCCTATGCCATGAGCT |
| ScFv domain | | GGGTCCGCCAAGCCCCCGGAAAGGGACTGGAATGGGTGTCCGCCATCTCGGGG |
| | | TCTGGAGGCTCAACTTACTACGCTGACTCCGTGAAGGGACGGTTCACCATTAG |
| | | CCGCGACAACTCCAAGAACACCCTCTACCTCCAAATGAACTCCCTGCGGGCCG |
| | | AGGATACCGCCGTCTACTACTGCGCCAAAGTGGAAGGTTCAGGATCGCTGGAC |
| | | TACTGGGGACAGGGTACTCTCGTGACCGTGTCATCGGGCGGAGGAGGTTCCGG |
| | | CGGTGGCGGCTCCGGCGGCGGAGGGTCGGAGATCGTGATGACCCAGAGCCCTG |
| | | GTACTCTGAGCCTTTCGCCGGGAGAAAGGGCCACCCTGTCCTGCCGCGCTTCC |
| | | CAATCCGTGTCCTCCGCGTACTTGGCGTGGTACCAGCAGAAGCCGGGACAGCC |
| | | CCCTCGGCTGCTGATCAGCGGGGCCAGCACCCGGGCAACCGGAATCCCAGACA |
| | | GATTCGGGGGTTCCGGCAGCGGCACAGATTTCACCCTGACTATTTCGAGGTTG |
| | | GAGCCCGAGGACTTTGCGGTGTATTACTGTCAGCACTACGGGTCGTCCTTTAA |
| | | TGGCTCCAGCCTGTTCACGTTCGGACAGGGGACCCGCCTGGAAATCAAG |
| BCMA_EBB- | 179 | EVQLVESGGGLVQPGGSLRLSCAASGFTFSSYAMSWVRQAPGKGLEWVSAISG |
| C1978-A4 - | | SGGSTYYADSVKGRFTISRDNSKNTLYLQMNSLRAEDTAVYYCAKVEGSGSLD |
| aa | | YWGQGTLVTVSS |
| VH | | |
| BCMA_EBB- | 200 | EIVMTQSPGTLSLSPGERATLSCRASQSVSSAYLAWYQQKPGQPPRLLISGAS |
| C1978-A4 - | | TRATGIPDRFGGSGSGTDFTLTISRLEPEDFAVYYCQHYGSSFNGSSLFTFGQ |
| aa | | GTRLEIK |
| VL | | |
| BCMA_EBB- | 221 | MALPVTALLLPLALLLHAARPEVQLVESGGGLVQPGGSLRLSCAASGFTFSSY |
| C1978-A4 - | | AMSWVRQAPGKGLEWVSAISGSGGSTYYADSVKGRFTISRDNSKNTLYLQMNS |
| aa | | LRAEDTAVYYCAKVEGSGSLDYWGQGTLVTVSSGGGGSGGGGSGGGGSEIVMT |
| Full CART | | QSPGTLSLSPGERATLSCRASQSVSSAYLAWYQQKPGQPPRLLISGASTRATG |
| | | IPDRFGGSGSGTDFTLTISRLEPEDFAVYYCQHYGSSFNGSSLFTFGQGTRLE |
| | | IKTTTPAPRPPTPAPTIASQPLSLRPEACRPAAGGAVHTRGLDFACDIYIWAP |
| | | LAGTCGVLLLSLVITLYCKRGRKKLLYIFKQPFMRPVQTTQEEDGCSCRFPEE |
| | | EEGGCELRVKFSRSADAPAYKQGQNQLYNELNLGRREEYDVLDKRRGRDPEMG |
| | | GKPRRKNPQEGLYNELQKDKMAEAYSEIGMKGERRRGKGHDGLYQGLSTATKD |
| | | TYDALHMQALPPR |
| BCMA_EBB- | 242 | ATGGCCCTCCCTGTCACCGCCCTGCTGCTTCCGCTGGCTCTTCTGCTCCACGC |
| C1978-A4 - nt | | CGCTCGGCCCGAAGTGCAGCTCGTGGAGTCAGGAGGCGGCCTGGTCCAGCCGG |
| Full CART | | GAGGGTCCCTTAGACTGTCATGCGCCGCAAGCGGATTCACTTTCTCCTCCTAT |
| | | GCCATGAGCTGGGTCCGCCAAGCCCCCGGAAAGGGACTGGAATGGGTGTCCGC |
| | | CATCTCGGGGTCTGGAGGCTCAACTTACTACGCTGACTCCGTGAAGGGACGGT |
| | | TCACCATTAGCCGCGACAACTCCAAGAACACCCTCTACCTCCAAATGAACTCC |
| | | CTGCGGGCCGAGGATACCGCCGTCTACTACTGCGCCAAAGTGGAAGGTTCAGG |
| | | ATCGCTGGACTACTGGGGACAGGGTACTCTCGTGACCGTGTCATCGGGCGGAG |
| | | GAGGTTCCGGCGGTGGCGGCTCCGGCGGCGGAGGGTCGGAGATCGTGATGACC |
| | | CAGAGCCCTGGTACTCTGAGCCTTTCGCCGGGAGAAAGGGCCACCCTGTCCTG |
| | | CCGCGCTTCCCAATCCGTGTCCTCCGCGTACTTGGCGTGGTACCAGCAGAAGC |
| | | CGGGACAGCCCCCTCGGCTGCTGATCAGCGGGGCCAGCACCCGGGCAACCGGA |
| | | ATCCCAGACAGATTCGGGGGTTCCGGCAGCGGCACAGATTTCACCCTGACTAT |
| | | TTCGAGGTTGGAGCCCGAGGACTTTGCGGTGTATTACTGTCAGCACTACGGGT |
| | | CGTCCTTTAATGGCTCCAGCCTGTTCACGTTCGGACAGGGGACCCGCCTGGAA |
| | | ATCAAGACCACTACCCCAGCACCGAGGCCACCCACCCCGGCTCCTACCATCGC |
| | | CTCCCAGCCTCTGTCCCTGCGTCCGGAGGCATGTAGACCCGCAGCTGGTGGGG |
| | | CCGTGCATACCCGGGGTCTTGACTTCGCCTGCGATATCTACATTTGGGCCCCT |
| | | CTGGCTGGTACTTGCGGGGTCCTGCTGCTTTCACTCGTGATCACTCTTTACTG |
| | | TAAGCGCGGTCGGAAGAAGCTGCTGTACATCTTTAAGCAACCCTTCATGAGGC |
| | | CTGTGCAGACTACTCAAGAGGAGGACGGCTGTTCATGCCGGTTCCCAGAGGAG |
| | | GAGGAAGGCGGCTGCGAACTGCGCGTGAAATTCAGCCGCAGCGCAGATGCTCC |
| | | AGCCTACAAGCAGGGGCAGAACCAGCTCTACAACGAACTCAATCTTGGTCGGA |
| | | GAGAGGAGTACGACGTGCTGGACAAGCGGAGAGGACGGGACCCAGAAATGGGC |
| | | GGGAAGCCGCGCAGAAAGAATCCCCAAGAGGGCCTGTACAACGAGCTCCAAAA |
| | | GGATAAGATGGCAGAAGCCTATAGCGAGATTGGTATGAAAGGGGAACGCAGAA |
| | | GAGGCAAAGGCCACGACGGACTGTACCAGGGACTCAGCACCGCCACCAAGGAC |
| | | ACCTATGACGCTCTTCACATGCAGGCCCTGCCGCCTCGG |

BCMA_EBB-C1978-G1

| | | |
|---|---|---|
| BCMA_EBB- | 138 | EVQLVETGGGLVQPGGSLRLSCAASGITFSRYPMSWVRQAPGKGLEW |
| C1978-G1 - | | VSGISDSGVSTYYADSAKGRFTISRDNSKNTLFLQMSSLRDEDTAVYY |
| aa | | CVTRAGSEASDIWGQGTMVTVSSGGGGSGGGGSGGGGSEIVLTQSPAT |
| ScFv domain | | LSLSPGERATLSCRASQSVSNSLAWYQQKPGQAPRLLIYDASSRATGIP |
| | | DRFSGSGSGTDFTLTISRLEPEDFAIYYCQQFGTSSGLTFGGGTKLEIK |
| BCMA_EBB- | 159 | GAAGTGCAACTGGTGGAAACCGGTGGCGGCCTGGTGCAGCCTGGAGGATCATT |
| C1978-G1 - | | GAGGCTGTCATGCGCGGCCAGCGGTATTACCTTCTCCCGGTACCCCATGTCCT |
| nt | | GGGTCAGACAGGCCCCGGGGAAAGGGCTTGAATGGGTGTCCGGGATCTCGGAC |
| ScFv domain | | TCCGGTGTCAGCACTTACTACGCCGACTCCGCCAAGGGACGCTTCACCATTTC |
| | | CCGGGACAACTCGAAGAACACCCTGTTCCTCCAAATGAGCTCCCTCCGGGACG |
| | | AGGATACTGCAGTGTACTACTGCGTGACCCGCGCCGGGTCCGAGGCGTCTGAC |
| | | ATTTGGGGACAGGGCACTATGGTCACCGTGTCGTCCGGCGGAGGGGGCTCGGG |
| | | AGGCGGTGGCAGCGGAGGAGGAGGGTCCGAGATCGTGCTGACCCAATCCCCGG |
| | | CCACCCTCTCGCTGAGCCCTGGAGAAAGGGCAACCTTGTCCTGTCGCGCGAGC |
| | | CAGTCCGTGAGCAACTCCCTGGCCTGGTACCAGCAGAAGCCCGGACAGGCTCC |
| | | GAGACTTCTGATCTACGACGCTTCGAGCCGGGCCACTGGAATCCCCGACCGCT |
| | | TTTCGGGGTCCGGCTCAGGAACCGATTTCACCCTGACAATCTCACGGCTGGAG |
| | | CCAGAGGATTTCGCCATCTATTACTGCCAGCAGTTCGGTACTTCCTCCGGCCT |
| | | GACTTTCGGAGGCGGCACGAAGCTCGAAATCAAG |
| BCMA_EBB- | 180 | EVQLVETGGGLVQPGGSLRLSCAASGITFSRYPMSWVRQAPGKGLEWVSGISD |
| C1978-G1 - | | SGVSTYYADSAKGRFTISRDNSKNTLFLQMSSLRDEDTAVYYCVTRAGSEASD |
| aa | | IWGQGTMVTVSS |
| VH | | |
| BCMA_EBB- | 201 | EIVLTQSPATLSLSPGERATLSCRASQSVSNSLAWYQQKPGQAPRLLIYDASS |
| C1978-G1 - | | RATGIPDRFSGSGSGTDFTLTISRLEPEDFAIYYCQQFGTSSGLTFGGGTKLE |
| aa | | IK |
| VL | | |
| BCMA_EBB- | 222 | MALPVTALLLPLALLLHAARPEVQLVETGGGLVQPGGSLRLSCAASGI |
| C1978-G1 - | | TFSRYPMSWVRQAPGKGLEWVSGISDSGVSTYYADSAKGRFTISRDNS |
| aa | | KNTLFLQMSSLRDEDTAVYYCVTRAGSEASDIWGQGTMVTVSSGGGG |
| Full CART | | SGGGGSGGGGSEIVLTQSPATLSLSPGERATLSCRASQSVSNSLAWYQQ |
| | | KPGQAPRLLIYDASSRATGIPDRFSGSGSGTDFTLTISRLEPEDFAIYYCQ |
| | | QFGTSSGLTFGGGTKLEIKTTTPAPRPPTPAPTIASQPLSLRPEACRPAAG |
| | | GAVHTRGLDFACDIYIWAPLAGTCGVLLLSLVITLYCKRGRKKLLYIFK |
| | | QPFMRPVQTTQEEDGCSCRFPEEEEGGCELRVKFSRSADAPAYKQGQN |
| | | QLYNELNLGRREEYDVLDKRRGRDPEMGGKPRRKNPQEGLYNELQK |
| | | DKMAEAYSEIGMKGERRRGKGHDGLYQGLSTATKDTYDALHMQALP |
| | | PR |
| BCMA_EBB- | 243 | ATGGCCCTCCCTGTCACCGCCCTGCTGCTTCCGCTGGCTCTTCTGCTCCACGC |
| C1978-G1 - | | CGCTCGGCCCGAAGTGCAACTGGTGGAAACCGGTGGCGGCCTGGTGCAGCCTG |
| nt | | GAGGATCATTGAGGCTGTCATGCGCGGCCAGCGGTATTACCTTCTCCCGGTAC |
| Full CART | | CCCATGTCCTGGGTCAGACAGGCCCCGGGGAAAGGGCTTGAATGGGTGTCCGG |
| | | GATCTCGGACTCCGGTGTCAGCACTTACTACGCCGACTCCGCCAAGGGACGCT |
| | | TCACCATTTCCCGGGACAACTCGAAGAACACCCTGTTCCTCCAAATGAGCTCC |
| | | CTCCGGGACGAGGATACTGCAGTGTACTACTGCGTGACCCGCGCCGGGTCCGA |
| | | GGCGTCTGACATTTGGGGACAGGGCACTATGGTCACCGTGTCGTCCGGCGGAG |
| | | GGGGCTCGGGAGGCGGTGGCAGCGGAGGAGGAGGGTCCGAGATCGTGCTGACC |
| | | CAATCCCCGGCCACCCTCTCGCTGAGCCCTGGAGAAAGGGCAACCTTGTCCTG |
| | | TCGCGCGAGCCAGTCCGTGAGCAACTCCCTGGCCTGGTACCAGCAGAAGCCCG |
| | | GACAGGCTCCGAGACTTCTGATCTACGACGCTTCGAGCCGGGCCACTGGAATC |
| | | CCCGACCGCTTTTCGGGGTCCGGCTCAGGAACCGATTTCACCCTGACAATCTC |
| | | ACGGCTGGAGCCAGAGGATTTCGCCATCTATTACTGCCAGCAGTTCGGTACTT |
| | | CCTCCGGCCTGACTTTCGGAGGCGGCACGAAGCTCGAAATCAAGACCACTACC |
| | | CCAGCACCGAGGCCACCCACCCCGGCTCCTACCATCGCCTCCCAGCCTCTGTC |
| | | CCTGCGTCCGGAGGCATGTAGACCCGCAGCTGGTGGGGCCGTGCATACCCGGG |
| | | GTCTTGACTTCGCCTGCGATATCTACATTTGGGCCCCTCTGGCTGGTACTTGC |
| | | GGGGTCCTGCTGCTTTCACTCGTGATCACTCTTTACTGTAAGCGCGGTCGGAA |
| | | GAAGCTGCTGTACATCTTTAAGCAACCCTTCATGAGGCCTGTGCAGACTACTC |
| | | AAGAGGAGGACGGCTGTTCATGCCGGTTCCCAGAGGAGGAGGAAGGCGGCTGC |
| | | GAACTGCGCGTGAAATTCAGCCGCAGCGCAGATGCTCCAGCCTACAAGCAGGG |
| | | GCAGAACCAGCTCTACAACGAACTCAATCTTGGTCGGAGAGAGGAGTACGACG |
| | | TGCTGGACAAGCGGAGAGGACGGGACCCAGAAATGGGCGGGAAGCCGCGCAGA |
| | | AAGAATCCCCAAGAGGGCCTGTACAACGAGCTCCAAAAGGATAAGATGGCAGA |
| | | AGCCTATAGCGAGATTGGTATGAAAGGGGAACGCAGAAGAGGCAAAGGCCACG |
| | | ACGGACTGTACCAGGGACTCAGCACCGCCACCAAGGACACCTATGACGCTCTT |
| | | CACATGCAGGCCCTGCCGCCTCGG |

BCMA_EBB-C1979-C1

| | | |
|---|---|---|
| BCMA_EBB- | 139 | QVQLVESGGGLVQPGGSLRLSCAASGFTFSSYAMSWVRQAPGKGLEWVSAISG |
| C1979-C1 - | | SGGSTYYADSVKGRFTISRDNAKNSLYLQMNSLRAEDTAIYYCARATYKRELR |
| aa | | YYYGMDVWGQGTMVTVSSGGGGSGGGGSGGGGSEIVMTQSPGTVSLSPGERAT |
| ScFv domain | | LSCRASQSVSSSFLAWYQQKPGQAPRLLIYGASSRATGIPDRFSGSGSGTDFT |
| | | LTISRLEPEDSAVYYCQQYHSSPSWTFGQGTRLEIK |
| BCMA_EBB- | 160 | CAAGTGCAGCTCGTGGAATCGGGTGGCGGACTGGTGCAGCCGGGGGGCTCACT |
| C1979-C1 - nt | | TAGACTGTCCTGCGCGGCCAGCGGATTCACTTTCTCCTCCTACGCCATGTCCT |
| ScFv domain | | GGGTCAGACAGGCCCCTGGAAAGGGCCTGGAATGGGTGTCCGCAATCAGCGGC |
| | | AGCGGCGGCTCGACCTATTACGCGGATTCAGTGAAGGGCAGATTCACCATTTC |
| | | CCGGGACAACGCCAAGAACTCCTTGTACCTTCAAATGAACTCCCTCCGCGCGG |
| | | AAGATACCGCAATCTACTACTGCGCTCGGGCCACTTACAAGAGGGAACTGCGC |
| | | TACTACTACGGGATGGACGTCTGGGGCCAGGGAACCATGGTCACCGTGTCCAG |
| | | CGGAGGAGGAGGATCGGGAGGAGGCGGTAGCGGGGGTGGAGGGTCGGAGATCG |
| | | TGATGACCCAGTCCCCCGGCACTGTGTCGCTGTCCCCCGGCGAACGGGCCACC |
| | | CTGTCATGTCGGGCCAGCCAGTCAGTGTCGTCAAGCTTCCTCGCCTGGTACCA |
| | | GCAGAAACCGGGACAAGCTCCCCGCCTGCTGATCTACGGAGCCAGCAGCCGGG |
| | | CCACCGGTATTCCTGACCGGTTCTCCGGTTCGGGGTCCGGGACCGACTTTACT |
| | | CTGACTATCTCTCGCCTCGAGCCAGAGGACTCCGCCGTGTATTACTGCCAGCA |
| | | GTACCACTCCTCCCCGTCCTGGACGTTCGGACAGGGCACAAGGCTGGAGATTA |
| | | AG |
| BCMA_EBB- | 181 | QVQLVESGGGLVQPGGSLRLSCAASGFTFSSYAMSWVRQAPGKGLEWVSAISG |
| C1979-C1 - | | SGGSTYYADSVKGRFTISRDNAKNSLYLQMNSLRAEDTAIYYCARATYKRELR |
| aa | | YYYGMDVWGQGTMVTVSS |
| VH | | |
| BCMA_EBB- | 202 | EIVMTQSPGTVSLSPGERATLSCRASQSVSSSFLAWYQQKPGQAPRLLIYGAS |
| C1979-C1 - | | SRATGIPDRFSGSGSGTDFTLTISRLEPEDSAVYYCQQYHSSPSWTFGQGTRL |
| aa | | EIK |
| VL | | |
| BCMA_EBB- | 223 | MALPVTALLLPLALLLHAARPQVQLVESGGGLVQPGGSLRLSCAASGFTFSSY |
| C1979-C1 - | | AMSWVRQAPGKGLEWVSAISGSGGSTYYADSVKGRFTISRDNAKNSLYLQMNS |
| aa | | LRAEDTAIYYCARATYKRELRYYYGMDVWGQGTMVTVSSGGGGSGGGGSGGGG |
| Full CART | | SEIVMTQSPGTVSLSPGERATLSCRASQSVSSSFLAWYQQKPGQAPRLLIYGA |
| | | SSRATGIPDRFSGSGSGTDFTLTISRLEPEDSAVYYCQQYHSSPSWTFGQGTR |
| | | LEIKTTTPAPRPPTPAPTIASQPLSLRPEACRPAAGGAVHTRGLDFACDIYIW |
| | | APLAGTCGVLLLSLVITLYCKRGRKKLLYIFKQPFMRPVQTTQEEDGCSCRFP |
| | | EEEEGGCELRVKFSRSADAPAYKQGQNQLYNELNLGRREEYDVLDKRRGRDPE |
| | | MGGKPRRKNPQEGLYNELQKDKMAEAYSEIGMKGERRRGKGHDGLYQGLSTAT |
| | | KDTYDALHMQALPPR |
| BCMA_EBB- | 244 | ATGGCCCTCCCTGTCACCGCCCTGCTGCTTCCGCTGGCTCTTCTGCTCCACGC |
| C1979-C1 - nt | | CGCTCGGCCCCAAGTGCAGCTCGTGGAATCGGGTGGCGGACTGGTGCAGCCGG |
| Full CART | | GGGGCTCACTTAGACTGTCCTGCGCGGCCAGCGGATTCACTTTCTCCTCCTAC |
| | | GCCATGTCCTGGGTCAGACAGGCCCCTGGAAAGGGCCTGGAATGGGTGTCCGC |
| | | AATCAGCGGCAGCGGCGGCTCGACCTATTACGCGGATTCAGTGAAGGGCAGAT |
| | | TCACCATTTCCCGGGACAACGCCAAGAACTCCTTGTACCTTCAAATGAACTCC |
| | | CTCCGCGCGGAAGATACCGCAATCTACTACTGCGCTCGGGCCACTTACAAGAG |
| | | GGAACTGCGCTACTACTACGGGATGGACGTCTGGGGCCAGGGAACCATGGTCA |
| | | CCGTGTCCAGCGGAGGAGGAGGATCGGGAGGAGGCGGTAGCGGGGGTGGAGGG |
| | | TCGGAGATCGTGATGACCCAGTCCCCCGGCACTGTGTCGCTGTCCCCCGGCGA |
| | | ACGGGCCACCCTGTCATGTCGGGCCAGCCAGTCAGTGTCGTCAAGCTTCCTCG |
| | | CCTGGTACCAGCAGAAACCGGGACAAGCTCCCCGCCTGCTGATCTACGGAGCC |
| | | AGCAGCCGGGCCACCGGTATTCCTGACCGGTTCTCCGGTTCGGGGTCCGGGAC |
| | | CGACTTTACTCTGACTATCTCTCGCCTCGAGCCAGAGGACTCCGCCGTGTATT |
| | | ACTGCCAGCAGTACCACTCCTCCCCGTCCTGGACGTTCGGACAGGGCACAAGG |
| | | CTGGAGATTAAGACCACTACCCCAGCACCGAGGCCACCCACCCCGGCTCCTAC |
| | | CATCGCCTCCCAGCCTCTGTCCCTGCGTCCGGAGGCATGTAGACCCGCAGCTG |
| | | GTGGGGCCGTGCATACCCGGGGTCTTGACTTCGCCTGCGATATCTACATTTGG |
| | | GCCCCTCTGGCTGGTACTTGCGGGGTCCTGCTGCTTTCACTCGTGATCACTCT |
| | | TTACTGTAAGCGCGGTCGGAAGAAGCTGCTGTACATCTTTAAGCAACCCTTCA |
| | | TGAGGCCTGTGCAGACTACTCAAGAGGAGGACGGCTGTTCATGCCGGTTCCCA |
| | | GAGGAGGAGGAAGGCGGCTGCGAACTGCGCGTGAAATTCAGCCGCAGCGCAGA |
| | | TGCTCCAGCCTACAAGCAGGGGCAGAACCAGCTCTACAACGAACTCAATCTTG |
| | | GTCGGAGAGAGGAGTACGACGTGCTGGACAAGCGGAGAGGACGGGACCCAGAA |
| | | ATGGGCGGGAAGCCGCGCAGAAAGAATCCCCAAGAGGGCCTGTACAACGAGCT |
| | | CCAAAAGGATAAGATGGCAGAAGCCTATAGCGAGATTGGTATGAAAGGGGAAC |
| | | GCAGAAGAGGCAAAGGCCACGACGGACTGTACCAGGGACTCAGCACCGCCACC |
| | | AAGGACACCTATGACGCTCTTCACATGCAGGCCCTGCCGCCTCGG |

BCMA_EBB-C1978-C7

| | | |
|---|---|---|
| BCMA_EBB- | 140 | EVQLVETGGGLVQPGGSLRLSCAASGFTFSSYAMSWVRQAPGKGLEWVSAISG |
| C1978-C7 - | | SGGSTYYADSVKGRFTISRDNSKNTLYLQMNTLKAEDTAVYYCARATYKRELR |
| aa | | YYYGMDVWGQGTTVTVSSGGGGSGGGGSGGGGSEIVLTQSPSTLSLSPGESAT |
| ScFv domain | | LSCRASQSVSTTFLAWYQQKPGQAPRLLIYGSSNRATGIPDRFSGSGSGTDFT |
| | | LTIRRLEPEDFAVYYCQQYHSSPSWTFGQGTKVEIK |
| BCMA_EBB- | 161 | GAGGTGCAGCTTGTGGAAACCGGTGGCGGACTGGTGCAGCCCGGAGGAAGCCT |
| C1978-C7 - nt | | CAGGCTGTCCTGCGCCGCGTCCGGCTTCACCTTCTCCTCGTACGCCATGTCCT |
| ScFv domain | | GGGTCCGCCAGGCCCCCGGAAAGGGCCTGGAATGGGTGTCCGCCATCTCTGGA |
| | | AGCGGAGGTTCCACGTACTACGCGGACAGCGTCAAGGGAAGGTTCACAATCTC |
| | | CCGCGATAATTCGAAGAACACTCTGTACCTTCAAATGAACACCCTGAAGGCCG |
| | | AGGACACTGCTGTGTACTACTGCGCACGGGCCACCTACAAGAGAGAGCTCCGG |
| | | TACTACTACGGAATGGACGTCTGGGGCCAGGGAACTACTGTGACCGTGTCCTC |
| | | GGGAGGGGGTGGCTCCGGGGGGGGCGGCTCCGGCGGAGGCGGTTCCGAGATTG |
| | | TGCTGACCCAGTCACCTTCAACTCTGTCGCTGTCCCCGGGAGAGAGCGCTACT |
| | | CTGAGCTGCCGGGCCAGCCAGTCCGTGTCCACCACCTTCCTCGCCTGGTATCA |
| | | GCAGAAGCCGGGGCAGGCACCACGGCTCTTGATCTACGGGTCAAGCAACAGAG |
| | | CGACCGGAATTCCTGACCGCTTCTCGGGGAGCGGTTCAGGCACCGACTTCACC |
| | | CTGACTATCCGGCGCCTGGAACCCGAAGATTTCGCCGTGTATTACTGTCAACA |
| | | GTACCACTCCTCGCCGTCCTGGACCTTTGGCCAAGGAACCAAAGTGGAAATCA |
| | | AG |
| BCMA_EBB- | 182 | EVQLVETGGGLVQPGGSLRLSCAASGFTFSSYAMSWVRQAPGKGLEWVSAISG |
| C1978-C7 - | | SGGSTYYADSVKGRFTISRDNSKNTLYLQMNTLKAEDTAVYYCARATYKRELR |
| aa | | YYYGMDVWGQGTTVTVSS |
| VH | | |
| BCMA_EBB- | 203 | EIVLTQSPSTLSLSPGESATLSCRASQSVSTTFLAWYQQKPGQAPRLLIYGSS |
| C1978-C7 - | | NRATGIPDRFSGSGSGTDFTLTIRRLEPEDFAVYYCQQYHSSPSWTFGQGTKV |
| aa | | EIK |
| VL | | |
| BCMA_EBB- | 224 | MALPVTALLLPLALLLHAARPEVQLVETGGGLVQPGGSLRLSCAASGFTFSSY |
| C1978-C7 - | | AMSWVRQAPGKGLEWVSAISGSGGSTYYADSVKGRFTISRDNSKNTLYLQMNT |
| aa | | LKAEDTAVYYCARATYKRELRYYYGMDVWGQGTTVTVSSGGGGSGGGGSGGGG |
| Full CART | | SEIVLTQSPSTLSLSPGESATLSCRASQSVSTTFLAWYQQKPGQAPRLLIYGS |
| | | SNRATGIPDRFSGSGSGTDFTLTIRRLEPEDFAVYYCQQYHSSPSWTFGQGTK |
| | | VEIKTTTPAPRPPTPAPTIASQPLSLRPEACRPAAGGAVHTRGLDFACDIYIW |
| | | APLAGTCGVLLLSLVITLYCKRGRKKLLYIFKQPFMRPVQTTQEEDGCSCRFP |
| | | EEEEGGCELRVKFSRSADAPAYKQGQNQLYNELNLGRREEYDVLDKRRGRDPE |
| | | MGGKPRRKNPQEGLYNELQKDKMAEAYSEIGMKGERRRGKGHDGLYQGLSTAT |
| | | KDTYDALHMQALPPR |
| BCMA_EBB- | 245 | ATGGCCCTCCCTGTCACCGCCCTGCTGCTTCCGCTGGCTCTTCTGCTCCACGC |
| C1978-C7 - nt | | CGCTCGGCCCGAGGTGCAGCTTGTGGAAACCGGTGGCGGACTGGTGCAGCCCG |
| Full CART | | GAGGAAGCCTCAGGCTGTCCTGCGCCGCGTCCGGCTTCACCTTCTCCTCGTAC |
| | | GCCATGTCCTGGGTCCGCCAGGCCCCCGGAAAGGGCCTGGAATGGGTGTCCGC |
| | | CATCTCTGGAAGCGGAGGTTCCACGTACTACGCGGACAGCGTCAAGGGAAGGT |
| | | TCACAATCTCCCGCGATAATTCGAAGAACACTCTGTACCTTCAAATGAACACC |
| | | CTGAAGGCCGAGGACACTGCTGTGTACTACTGCGCACGGGCCACCTACAAGAG |
| | | AGAGCTCCGGTACTACTACGGAATGGACGTCTGGGGCCAGGGAACTACTGTGA |
| | | CCGTGTCCTCGGGAGGGGGTGGCTCCGGGGGGGGCGGCTCCGGCGGAGGCGGT |
| | | TCCGAGATTGTGCTGACCCAGTCACCTTCAACTCTGTCGCTGTCCCCGGGAGA |
| | | GAGCGCTACTCTGAGCTGCCGGGCCAGCCAGTCCGTGTCCACCACCTTCCTCG |
| | | CCTGGTATCAGCAGAAGCCGGGGCAGGCACCACGGCTCTTGATCTACGGGTCA |
| | | AGCAACAGAGCGACCGGAATTCCTGACCGCTTCTCGGGGAGCGGTTCAGGCAC |
| | | CGACTTCACCCTGACTATCCGGCGCCTGGAACCCGAAGATTTCGCCGTGTATT |
| | | ACTGTCAACAGTACCACTCCTCGCCGTCCTGGACCTTTGGCCAAGGAACCAAA |
| | | GTGGAAATCAAGACCACTACCCCAGCACCGAGGCCACCCACCCCGGCTCCTAC |
| | | CATCGCCTCCCAGCCTCTGTCCCTGCGTCCGGAGGCATGTAGACCCGCAGCTG |
| | | GTGGGGCCGTGCATACCCGGGGTCTTGACTTCGCCTGCGATATCTACATTTGG |
| | | GCCCCTCTGGCTGGTACTTGCGGGGTCCTGCTGCTTTCACTCGTGATCACTCT |
| | | TTACTGTAAGCGCGGTCGGAAGAAGCTGCTGTACATCTTTAAGCAACCCTTCA |
| | | TGAGGCCTGTGCAGACTACTCAAGAGGAGGACGGCTGTTCATGCCGGTTCCCA |
| | | GAGGAGGAGGAAGGCGGCTGCGAACTGCGCGTGAAATTCAGCCGCAGCGCAGA |
| | | TGCTCCAGCCTACAAGCAGGGGCAGAACCAGCTCTACAACGAACTCAATCTTG |
| | | GTCGGAGAGAGGAGTACGACGTGCTGGACAAGCGGAGAGGACGGGACCCAGAA |
| | | ATGGGCGGGAAGCCGCGCAGAAAGAATCCCCAAGAGGGCCTGTACAACGAGCT |
| | | CCAAAAGGATAAGATGGCAGAAGCCTATAGCGAGATTGGTATGAAAGGGGAAC |
| | | GCAGAAGAGGCAAAGGCCACGACGGACTGTACCAGGGACTCAGCACCGCCACC |
| | | AAGGACACCTATGACGCTCTTCACATGCAGGCCCTGCCGCCTCGG |

BCMA_EBB-C1978-D10

| | | |
|---|---|---|
| BCMA_EBB- | 141 | EVQLVETGGGLVQPGRSLRLSCAASGFTFDDYAMHWVRQAPGKGLEWVSGISW |
| 01978-D10- | | NSGSIGYADSVKGRFTISRDNAKNSLYLQMNSLRDEDTAVYYCARVGKAVPDV |
| aa | | WGQGTTVTVSSGGGGSGGGGSGGGGSDIVMTQTPSSLSASVGDRVTITCRASQ |
| ScFv domain | | SISSYLNWYQQKPGKAPKLLIYAASSLQSGVPSRFSGSGSGTDFTLTISSLQP |
| | | EDFATYYCQQSYSTPYSFGQGTRLEIK |
| BCMA_EBB- | 162 | GAAGTGCAGCTCGTGGAAACTGGAGGTGGACTCGTGCAGCCTGGACGGTCGCT |
| C1978-D10- | | GCGGCTGAGCTGCGCTGCATCCGGCTTCACCTTCGACGATTATGCCATGCACT |
| nt | | GGGTCAGACAGGCGCCAGGGAAGGGACTTGAGTGGGTGTCCGGTATCAGCTGG |
| ScFv domain | | AATAGCGGCTCAATCGGATACGCGGACTCCGTGAAGGGAAGGTTCACCATTTC |
| | | CCGCGACAACGCCAAGAACTCCCTGTACTTGCAAATGAACAGCCTCCGGGATG |
| | | AGGACACTGCCGTGTACTACTGCGCCCGCGTCGGAAAAGCTGTGCCCGACGTC |
| | | TGGGGCCAGGGAACCACTGTGACCGTGTCCAGCGGCGGGGGTGGATCGGGCGG |
| | | TGGAGGGTCCGGTGGAGGGGGCTCAGATATTGTGATGACCCAGACCCCCTCGT |
| | | CCCTGTCCGCCTCGGTCGGCGACCGCGTGACTATCACATGTAGAGCCTCGCAG |
| | | AGCATCTCCAGCTACCTGAACTGGTATCAGCAGAAGCCGGGGAAGGCCCCGAA |
| | | GCTCCTGATCTACGCGGCATCATCACTGCAATCGGGAGTGCCGAGCCGGTTTT |
| | | CCGGGTCCGGCTCCGGCACCGACTTCACGCTGACCATTTCTTCCCTGCAACCC |
| | | GAGGACTTCGCCACTTACTACTGCCAGCAGTCCTACTCCACCCCTTACTCCTT |
| | | CGGCCAAGGAACCAGGCTGGAAATCAAG |
| BCMA_EBB- | 183 | EVQLVETGGGLVQPGRSLRLSCAASGFTFDDYAMHWVRQAPGKGLEWVSGISW |
| 01978-D10- | | NSGSIGYADSVKGRFTISRDNAKNSLYLQMNSLRDEDTAVYYCARVGKAVPDV |
| aa | | WGQGTTVTVSS |
| VH | | |
| BCMA_EBB- | 204 | DIVMTQTPSSLSASVGDRVTITCRASQSISSYLNWYQQKPGKAPKLLIYAASS |
| C1978-D10- | | LQSGVPSRFSGSGSGTDFTLTISSLQPEDFATYYCQQSYSTPYSFGQGTRLEI |
| aa | | K |
| VL | | |
| BCMA_EBB- | 225 | MALPVTALLLPLALLLHAARPEVQLVETGGGLVQPGRSLRLSCAASGFTFDDY |
| 01978-D10- | | AMHWVRQAPGKGLEWVSGISWNSGSIGYADSVKGRFTISRDNAKNSLYLQMNS |
| aa | | LRDEDTAVYYCARVGKAVPDVWGQGTTVTVSSGGGGSGGGGSGGGGSDIVMTQ |
| Full CART | | TPSSLSASVGDRVTITCRASQSISSYLNWYQQKPGKAPKLLIYAASSLQSGVP |
| | | SRFSGSGSGTDFTLTISSLQPEDFATYYCQQSYSTPYSFGQGTRLEIKTTTPA |
| | | PRPPTPAPTIASQPLSLRPEACRPAAGGAVHTRGLDFACDIYIWAPLAGTCGV |
| | | LLLSLVITLYCKRGRKKLLYIFKQPFMRPVQTTQEEDGCSCRFPEEEEGGCEL |
| | | RVKFSRSADAPAYKQGQNQLYNELNLGRREEYDVLDKRRGRDPEMGGKPRRKN |
| | | PQEGLYNELQKDKMAEAYSEIGMKGERRRGKGHDGLYQGLSTATKDTYDALHM |
| | | QALPPR |
| BCMA_EBB- | 246 | ATGGCCCTCCCTGTCACCGCCCTGCTGCTTCCGCTGGCTCTTCTGCTCCACGC |
| C1978-D10- | | CGCTCGGCCCGAAGTGCAGCTCGTGGAAACTGGAGGTGGACTCGTGCAGCCTG |
| nt | | GACGGTCGCTGCGGCTGAGCTGCGCTGCATCCGGCTTCACCTTCGACGATTAT |
| Full CART | | GCCATGCACTGGGTCAGACAGGCGCCAGGGAAGGGACTTGAGTGGGTGTCCGG |
| | | TATCAGCTGGAATAGCGGCTCAATCGGATACGCGGACTCCGTGAAGGGAAGGT |
| | | TCACCATTTCCCGCGACAACGCCAAGAACTCCCTGTACTTGCAAATGAACAGC |
| | | CTCCGGGATGAGGACACTGCCGTGTACTACTGCGCCCGCGTCGGAAAAGCTGT |
| | | GCCCGACGTCTGGGGCCAGGGAACCACTGTGACCGTGTCCAGCGGCGGGGGTG |
| | | GATCGGGCGGTGGAGGGTCCGGTGGAGGGGGCTCAGATATTGTGATGACCCAG |
| | | ACCCCCTCGTCCCTGTCCGCCTCGGTCGGCGACCGCGTGACTATCACATGTAG |
| | | AGCCTCGCAGAGCATCTCCAGCTACCTGAACTGGTATCAGCAGAAGCCGGGGA |
| | | AGGCCCCGAAGCTCCTGATCTACGCGGCATCATCACTGCAATCGGGAGTGCCG |
| | | AGCCGGTTTTCCGGGTCCGGCTCCGGCACCGACTTCACGCTGACCATTTCTTC |
| | | CCTGCAACCCGAGGACTTCGCCACTTACTACTGCCAGCAGTCCTACTCCACCC |
| | | CTTACTCCTTCGGCCAAGGAACCAGGCTGGAAATCAAGACCACTACCCCAGCA |
| | | CCGAGGCCACCCACCCCGGCTCCTACCATCGCCTCCCAGCCTCTGTCCCTGCG |
| | | TCCGGAGGCATGTAGACCCGCAGCTGGTGGGGCCGTGCATACCCGGGGTCTTG |
| | | ACTTCGCCTGCGATATCTACATTTGGGCCCCTCTGGCTGGTACTTGCGGGGTC |
| | | CTGCTGCTTTCACTCGTGATCACTCTTTACTGTAAGCGCGGTCGGAAGAAGCT |
| | | GCTGTACATCTTTAAGCAACCCTTCATGAGGCCTGTGCAGACTACTCAAGAGG |
| | | AGGACGGCTGTTCATGCCGGTTCCCAGAGGAGGAGGAAGGCGGCTGCGAACTG |
| | | CGCGTGAAATTCAGCCGCAGCGCAGATGCTCCAGCCTACAAGCAGGGGCAGAA |
| | | CCAGCTCTACAACGAACTCAATCTTGGTCGGAGAGAGGAGTACGACGTGCTGG |
| | | ACAAGCGGAGAGGACGGGACCCAGAAATGGGCGGGAAGCCGCGCAGAAAGAAT |
| | | CCCCAAGAGGGCCTGTACAACGAGCTCCAAAAGGATAAGATGGCAGAAGCCTA |
| | | TAGCGAGATTGGTATGAAAGGGGAACGCAGAAGAGGCAAAGGCCACGACGGAC |
| | | TGTACCAGGGACTCAGCACCGCCACCAAGGACACCTATGACGCTCTTCACATG |
| | | CAGGCCCTGCCGCCTCGG |

BCMA_EBB-C1979-C12

| | | |
|---|---|---|
| BCMA_EBB- | 142 | EVQLVESGGGLVQPGRSLRLSCTASGFTFDDYAMHWVRQRPGKGLEWVASINW |
| C1979-C12- | | KGNSLAYGDSVKGRFAISRDNAKNTVFLQMNSLRTEDTAVYYCASHQGVAYYN |
| aa | | YAMDVWGRGTLVTVSSGGGGSGGGGSGGGGSEIVLTQSPGTLSLSPGERATLS |
| ScFv domain | | CRATQSIGSSFLAWYQQRPGQAPRLLIYGASQRATGIPDRFSGRGSGTDFTLT |
| | | ISRVEPEDSAVYYCQHYESSPSWTFGQGTKVEIK |
| BCMA_EBB- | 163 | GAAGTGCAGCTCGTGGAGAGCGGGGGAGGATTGGTGCAGCCCGGAAGGTCCCT |
| C1979-C12 - | | GCGGCTCTCCTGCACTGCGTCTGGCTTCACCTTCGACGACTACGCGATGCACT |
| nt | | GGGTCAGACAGCGCCCGGGAAAGGGCCTGGAATGGGTCGCCTCAATCAACTGG |
| ScFv domain | | AAGGGAAACTCCCTGGCCTATGGCGACAGCGTGAAGGGCCGCTTCGCCATTTC |
| | | GCGCGACAACGCCAAGAACACCGTGTTTCTGCAAATGAATTCCCTGCGGACCG |
| | | AGGATACCGCTGTGTACTACTGCGCCAGCCACCAGGGCGTGGCATACTATAAC |
| | | TACGCCATGGACGTGTGGGGAAGAGGGACGCTCGTCACCGTGTCCTCCGGGGG |
| | | CGGTGGATCGGGTGGAGGAGGAAGCGGTGGCGGGGGCAGCGAAATCGTGCTGA |
| | | CTCAGAGCCCGGGAACTCTTTCACTGTCCCCGGGAGAACGGGCCACTCTCTCG |
| | | TGCCGGGCCACCCAGTCCATCGGCTCCTCCTTCCTTGCCTGGTACCAGCAGAG |
| | | GCCAGGACAGGCGCCCCGCCTGCTGATCTACGGTGCTTCCCAACGCGCCACTG |
| | | GCATTCCTGACCGGTTCAGCGGCAGAGGGTCGGGAACCGATTTCACACTGACC |
| | | ATTTCCCGGGTGGAGCCCGAAGATTCGGCAGTCTACTACTGTCAGCATTACGA |
| | | GTCCTCCCCTTCATGGACCTTCGGTCAAGGGACCAAAGTGGAGATCAAG |
| BCMA_EBB- | 184 | EVQLVESGGGLVQPGRSLRLSCTASGFTFDDYAMHWVRQRPGKGLEWVASINW |
| C1979-C12 - | | KGNSLAYGDSVKGRFAISRDNAKNTVFLQMNSLRTEDTAVYYCASHQGVAYYN |
| aa | | YAMDVWGRGTLVTVSS |
| VH | | |
| BCMA_EBB- | 205 | EIVLTQSPGTLSLSPGERATLSCRATQSIGSSFLAWYQQRPGQAPRLLIYGAS |
| C1979-C12 - | | QRATGIPDRFSGRGSGTDFTLTISRVEPEDSAVYYCQHYESSPSWTFGQGTKV |
| aa | | EIK |
| VL | | |
| BCMA_EBB- | 226 | MALPVTALLLPLALLLHAARPEVQLVESGGGLVQPGRSLRLSCTASGFTFDDY |
| C1979-C12 - | | AMHWVRQRPGKGLEWVASINWKGNSLAYGDSVKGRFAISRDNAKNTVFLQMNS |
| aa | | LRTEDTAVYYCASHQGVAYYNYAMDVWGRGTLVTVSSGGGGSGGGGSGGGGSE |
| Full CART | | IVLTQSPGTLSLSPGERATLSCRATQSIGSSFLAWYQQRPGQAPRLLIYGASQ |
| | | RATGIPDRFSGRGSGTDFTLTISRVEPEDSAVYYCQHYESSPSWTFGQGTKVE |
| | | IKTTTPAPRPPTPAPTIASQPLSLRPEACRPAAGGAVHTRGLDFACDIYIWAP |
| | | LAGTCGVLLLSLVITLYCKRGRKKLLYIFKQPFMRPVQTTQEEDGCSCRFPEE |
| | | EEGGCELRVKFSRSADAPAYKQGQNQLYNELNLGRREEYDVLDKRRGRDPEMG |
| | | GKPRRKNPQEGLYNELQKDKMAEAYSEIGMKGERRRGKGHDGLYQGLSTATKD |
| | | TYDALHMQALPPR |
| BCMA_EBB- | 247 | ATGGCCCTCCCTGTCACCGCCCTGCTGCTTCCGCTGGCTCTTCTGCTCCACGC |
| C1979-C12 - | | CGCTCGGCCCGAAGTGCAGCTCGTGGAGAGCGGGGGAGGATTGGTGCAGCCCG |
| nt | | GAAGGTCCCTGCGGCTCTCCTGCACTGCGTCTGGCTTCACCTTCGACGACTAC |
| Full CART | | GCGATGCACTGGGTCAGACAGCGCCCGGGAAAGGGCCTGGAATGGGTCGCCTC |
| | | AATCAACTGGAAGGGAAACTCCCTGGCCTATGGCGACAGCGTGAAGGGCCGCT |
| | | TCGCCATTTCGCGCGACAACGCCAAGAACACCGTGTTTCTGCAAATGAATTCC |
| | | CTGCGGACCGAGGATACCGCTGTGTACTACTGCGCCAGCCACCAGGGCGTGGC |
| | | ATACTATAACTACGCCATGGACGTGTGGGGAAGAGGGACGCTCGTCACCGTGT |
| | | CCTCCGGGGGCGGTGGATCGGGTGGAGGAGGAAGCGGTGGCGGGGGCAGCGAA |
| | | ATCGTGCTGACTCAGAGCCCGGGAACTCTTTCACTGTCCCCGGGAGAACGGGC |
| | | CACTCTCTCGTGCCGGGCCACCCAGTCCATCGGCTCCTCCTTCCTTGCCTGGT |
| | | ACCAGCAGAGGCCAGGACAGGCGCCCCGCCTGCTGATCTACGGTGCTTCCCAA |
| | | CGCGCCACTGGCATTCCTGACCGGTTCAGCGGCAGAGGGTCGGGAACCGATTT |
| | | CACACTGACCATTTCCCGGGTGGAGCCCGAAGATTCGGCAGTCTACTACTGTC |
| | | AGCATTACGAGTCCTCCCCTTCATGGACCTTCGGTCAAGGGACCAAAGTGGAG |
| | | ATCAAGACCACTACCCCAGCACCGAGGCCACCCACCCCGGCTCCTACCATCGC |
| | | CTCCCAGCCTCTGTCCCTGCGTCCGGAGGCATGTAGACCCGCAGCTGGTGGGG |
| | | CCGTGCATACCCGGGGTCTTGACTTCGCCTGCGATATCTACATTTGGGCCCCT |
| | | CTGGCTGGTACTTGCGGGGTCCTGCTGCTTTCACTCGTGATCACTCTTTACTG |
| | | TAAGCGCGGTCGGAAGAAGCTGCTGTACATCTTTAAGCAACCCTTCATGAGGC |
| | | CTGTGCAGACTACTCAAGAGGAGGACGGCTGTTCATGCCGGTTCCCAGAGGAG |
| | | GAGGAAGGCGGCTGCGAACTGCGCGTGAAATTCAGCCGCAGCGCAGATGCTCC |
| | | AGCCTACAAGCAGGGGCAGAACCAGCTCTACAACGAACTCAATCTTGGTCGGA |
| | | GAGAGGAGTACGACGTGCTGGACAAGCGGAGAGGACGGGACCCAGAAATGGGC |
| | | GGGAAGCCGCGCAGAAAGAATCCCCAAGAGGGCCTGTACAACGAGCTCCAAAA |
| | | GGATAAGATGGCAGAAGCCTATAGCGAGATTGGTATGAAAGGGGAACGCAGAA |
| | | GAGGCAAAGGCCACGACGGACTGTACCAGGGACTCAGCACCGCCACCAAGGAC |
| | | ACCTATGACGCTCTTCACATGCAGGCCCTGCCGCCTCGG |

BCMA_EBB-C1980-G4

| | | |
|---|---|---|
| BCMA_EBB- | 143 | EVQLVESGGGLVQPGGSLRLSCAASGFTFSSYAMSWVRQAPGKGLEW |
| C1980-G4- aa | | VSAISGSGGSTYYADSVKGRFTISRDNSKNTLYLQMNSLRAEDTAVYY |
| ScFv domain | | CAKVVRDGMDVWGQGTTVTVSSGGGGSGGGGSGGGGSEIVLTQSPA |
| | | TLSLSPGERATLSCRASQSVSSSYLAWYQQKPGQAPRLLIYGASSRATG |
| | | IPDRFSGNGSGTDFTLTISRLEPEDFAVYYCQQYGSPPRFTFGPGTKVDI |
| | | K |
| BCMA_EBB- | 164 | GAGGTGCAGTTGGTCGAAAGCGGGGGCGGGCTTGTGCAGCCTGGCGGATCACT |
| C1980-G4- nt | | GCGGCTGTCCTGCGCGGCATCAGGCTTCACGTTTTCTTCCTACGCCATGTCCT |
| ScFv domain | | GGGTGCGCCAGGCCCCTGGAAAGGGACTGGAATGGGTGTCCGCGATTTCGGGG |
| | | TCCGGCGGGAGCACCTACTACGCCGATTCCGTGAAGGGCCGCTTCACTATCTC |
| | | GCGGGACAACTCCAAGAACACCCTCTACCTCCAAATGAATAGCCTGCGGGCCG |
| | | AGGATACCGCCGTCTACTATTGCGCTAAGGTCGTGCGCGACGGAATGGACGTG |
| | | TGGGGACAGGGTACCACCGTGACAGTGTCCTCGGGGGGAGGCGGTAGCGGCGG |
| | | AGGAGGAAGCGGTGGTGGAGGTTCCGAGATTGTGCTGACTCAATCACCCGCGA |
| | | CCCTGAGCCTGTCCCCCGGCGAAAGGGCCACTCTGTCCTGTCGGGCCAGCCAA |
| | | TCAGTCTCCTCCTCGTACCTGGCCTGGTACCAGCAGAAGCCAGGACAGGCTCC |
| | | GAGACTCCTTATCTATGGCGCATCCTCCCGCGCCACCGGAATCCCGGATAGGT |
| | | TCTCGGGAAACGGATCGGGGACCGACTTCACTCTCACCATCTCCCGGCTGGAA |
| | | CCGGAGGACTTCGCCGTGTACTACTGCCAGCAGTACGGCAGCCCGCCTAGATT |
| | | CACTTTCGGCCCCGGCACCAAAGTGGACATCAAG |
| BCMA_EBB- | 185 | EVQLVESGGGLVQPGGSLRLSCAASGFTFSSYAMSWVRQAPGKGLEWVSAISG |
| C1980-G4- aa | | SGGSTYYADSVKGRFTISRDNSKNTLYLQMNSLRAEDTAVYYCAKVVRDGMDV |
| VH | | WGQGTTVTVSS |
| BCMA_EBB- | 206 | EIVLTQSPATLSLSPGERATLSCRASQSVSSSYLAWYQQKPGQAPRLLIYGAS |
| C1980-G4- aa | | SRATGIPDRFSGNGSGTDFTLTISRLEPEDFAVYYCQQYGSPPRFTFGPGTKV |
| VL | | DIK |
| BCMA_EBB- | 227 | MALPVTALLLPLALLLHAARPEVQLVESGGGLVQPGGSLRLSCAASGF |
| C1980-G4- aa | | TFSSYAMSWVRQAPGKGLEWVSAISGSGGSTYYADSVKGRFTISRDNS |
| Full CART | | KNTLYLQMNSLRAEDTAVYYCAKVVRDGMDVWGQGTTVTVSSGGG |
| | | GSGGGGSGGGGSEIVLTQSPATLSLSPGERATLSCRASQSVSSSYLAWY |
| | | QQKPGQAPRLLIYGASSRATGIPDRFSGNGSGTDFTLTISRLEPEDFAVY |
| | | YCQQYGSPPRFTFGPGTKVDIKTTTPAPRPPTPAPTIASQPLSLRPEACRP |
| | | AAGGAVHTRGLDFACDIYIWAPLAGTCGVLLLSLVITLYCKRGRKKLL |
| | | YIFKQPFMRPVQTTQEEDGCSCRFPEEEEGGCELRVKFSRSADAPAYK |
| | | QGQNQLYNELNLGRREEYDVLDKRRGRDPEMGGKPRRKNPQEGLYN |
| | | ELQKDKMAEAYSEIGMKGERRRGKGHDGLYQGLSTATKDTYDALHM |
| | | QALPPR |
| BCMA_EBB- | 248 | ATGGCCCTCCCTGTCACCGCCCTGCTGCTTCCGCTGGCTCTTCTGCTCCACGC |
| C1980-G4- nt | | CGCTCGGCCCGAGGTGCAGTTGGTCGAAAGCGGGGGCGGGCTTGTGCAGCCTG |
| Full CART | | GCGGATCACTGCGGCTGTCCTGCGCGGCATCAGGCTTCACGTTTTCTTCCTAC |
| | | GCCATGTCCTGGGTGCGCCAGGCCCCTGGAAAGGGACTGGAATGGGTGTCCGC |
| | | GATTTCGGGGTCCGGCGGGAGCACCTACTACGCCGATTCCGTGAAGGGCCGCT |
| | | TCACTATCTCGCGGGACAACTCCAAGAACACCCTCTACCTCCAAATGAATAGC |
| | | CTGCGGGCCGAGGATACCGCCGTCTACTATTGCGCTAAGGTCGTGCGCGACGG |
| | | AATGGACGTGTGGGGACAGGGTACCACCGTGACAGTGTCCTCGGGGGGAGGCG |
| | | GTAGCGGCGGAGGAGGAAGCGGTGGTGGAGGTTCCGAGATTGTGCTGACTCAA |
| | | TCACCCGCGACCCTGAGCCTGTCCCCCGGCGAAAGGGCCACTCTGTCCTGTCG |
| | | GGCCAGCCAATCAGTCTCCTCCTCGTACCTGGCCTGGTACCAGCAGAAGCCAG |
| | | GACAGGCTCCGAGACTCCTTATCTATGGCGCATCCTCCCGCGCCACCGGAATC |
| | | CCGGATAGGTTCTCGGGAAACGGATCGGGGACCGACTTCACTCTCACCATCTC |
| | | CCGGCTGGAACCGGAGGACTTCGCCGTGTACTACTGCCAGCAGTACGGCAGCC |
| | | CGCCTAGATTCACTTTCGGCCCCGGCACCAAAGTGGACATCAAGACCACTACC |
| | | CCAGCACCGAGGCCACCCACCCCGGCTCCTACCATCGCCTCCCAGCCTCTGTC |
| | | CCTGCGTCCGGAGGCATGTAGACCCGCAGCTGGTGGGGCCGTGCATACCCGGG |
| | | GTCTTGACTTCGCCTGCGATATCTACATTTGGGCCCCTCTGGCTGGTACTTGC |
| | | GGGGTCCTGCTGCTTTCACTCGTGATCACTCTTTACTGTAAGCGCGGTCGGAA |
| | | GAAGCTGCTGTACATCTTTAAGCAACCCTTCATGAGGCCTGTGCAGACTACTC |
| | | AAGAGGAGGACGGCTGTTCATGCCGGTTCCCAGAGGAGGAGGAAGGCGGCTGC |
| | | GAACTGCGCGTGAAATTCAGCCGCAGCGCAGATGCTCCAGCCTACAAGCAGGG |
| | | GCAGAACCAGCTCTACAACGAACTCAATCTTGGTCGGAGAGAGGAGTACGACG |
| | | TGCTGGACAAGCGGAGAGGACGGGACCCAGAAATGGGCGGGAAGCCGCGCAGA |
| | | AAGAATCCCCAAGAGGGCCTGTACAACGAGCTCCAAAAGGATAAGATGGCAGA |
| | | AGCCTATAGCGAGATTGGTATGAAAGGGGAACGCAGAAGAGGCAAAGGCCACG |
| | | ACGGACTGTACCAGGGACTCAGCACCGCCACCAAGGACACCTATGACGCTCTT |
| | | CACATGCAGGCCCTGCCGCCTCGG |

BCMA_EBB-C1980-D2

| | | |
|---|---|---|
| BCMA_EBB- | 144 | EVQLLESGGGLVQPGGSLRLSCAASGFTFSSYAMSWVRQAPGKGLEWVSAISG |
| C1980-D2- aa | | SGGSTYYADSVKGRFTISRDNSKNTLYLQMNSLRAEDTAVYYCAKIPQTGTFD |
| ScFv domain | | YWGQGTLVTVSSGGGGSGGGGSGGGGSEIVLTQSPGTLSLSPGERATLSCRAS |
| | | QSVSSSYLAWYQQRPGQAPRLLIYGASSRATGIPDRFSGSGSGTDFTLTISRL |
| | | EPEDFAVYYCQHYGSSPSWTFGQGTRLEIK |
| BCMA_EBB- | 165 | GAAGTGCAGCTGCTGGAGTCCGGCGGTGGATTGGTGCAACCGGGGGGATCGCT |
| C1980-D2- nt | | CAGACTGTCCTGTGCGGCGTCAGGCTTCACCTTCTCGAGCTACGCCATGTCAT |
| ScFv domain | | GGGTCAGACAGGCCCCTGGAAAGGGTCTGGAATGGGTGTCCGCCATTTCCGGG |
| | | AGCGGGGGATCTACATACTACGCCGATAGCGTGAAGGGCCGCTTCACCATTTC |
| | | CCGGGACAACTCCAAGAACACTCTCTATCTGCAAATGAACTCCCTCCGCGCTG |
| | | AGGACACTGCCGTGTACTACTGCGCCAAAATCCCTCAGACCGGCACCTTCGAC |
| | | TACTGGGGACAGGGGACTCTGGTCACCGTCAGCAGCGGTGGCGGAGGTTCGGG |
| | | GGGAGGAGGAAGCGGCGGCGGAGGGTCCGAGATTGTGCTGACCCAGTCACCCG |
| | | GCACTTTGTCCCTGTCGCCTGGAGAAAGGGCCACCCTTTCCTGCCGGGCATCC |
| | | CAATCCGTGTCCTCCTCGTACCTGGCCTGGTACCAGCAGAGGCCCGGACAGGC |
| | | CCCACGGCTTCTGATCTACGGAGCAAGCAGCCGCGCGACCGGTATCCCGGACC |
| | | GGTTTTCGGGCTCGGGCTCAGGAACTGACTTCACCCTCACCATCTCCCGCCTG |
| | | GAACCCGAAGATTTCGCTGTGTATTACTGCCAGCACTACGGCAGCTCCCCGTC |
| | | CTGGACGTTCGGCCAGGGAACTCGGCTGGAGATCAAG |
| BCMA_EBB- | 186 | EVQLLESGGGLVQPGGSLRLSCAASGFTFSSYAMSWVRQAPGKGLEWVSAISG |
| C1980-D2- aa | | SGGSTYYADSVKGRFTISRDNSKNTLYLQMNSLRAEDTAVYYCAKIPQTGTFD |
| VH | | YWGQGTLVTVSS |
| BCMA_EBB- | 207 | EIVLTQSPGTLSLSPGERATLSCRASQSVSSSYLAWYQQRPGQAPRLLIYGAS |
| C1980-D2- aa | | SRATGIPDRFSGSGSGTDFTLTISRLEPEDFAVYYCQHYGSSPSWTFGQGTRL |
| VL | | EIK |
| BCMA_EBB- | 228 | MALPVTALLLPLALLLHAARPEVQLLESGGGLVQPGGSLRLSCAASGFTFSSY |
| C1980-D2- aa | | AMSWVRQAPGKGLEWVSAISGSGGSTYYADSVKGRFTISRDNSKNTLYLQMNS |
| Full CART | | LRAEDTAVYYCAKIPQTGTFDYWGQGTLVTVSSGGGGSGGGGSGGGGSEIVLT |
| | | QSPGTLSLSPGERATLSCRASQSVSSSYLAWYQQRPGQAPRLLIYGASSRATG |
| | | IPDRFSGSGSGTDFTLTISRLEPEDFAVYYCQHYGSSPSWTFGQGTRLEIKTT |
| | | TPAPRPPTPAPTIASQPLSLRPEACRPAAGGAVHTRGLDFACDIYIWAPLAGT |
| | | CGVLLLSLVITLYCKRGRKKLLYIFKQPFMRPVQTTQEEDGCSCRFPEEEEGG |
| | | CELRVKFSRSADAPAYKQGQNQLYNELNLGRREEYDVLDKRRGRDPEMGGKPR |
| | | RKNPQEGLYNELQKDKMAEAYSEIGMKGERRRGKGHDGLYQGLSTATKDTYDA |
| | | LHMQALPPR |
| BCMA_EBB- | 249 | ATGGCCCTCCCTGTCACCGCCCTGCTGCTTCCGCTGGCTCTTCTGCTCCACGC |
| C1980-D2- nt | | CGCTCGGCCCGAAGTGCAGCTGCTGGAGTCCGGCGGTGGATTGGTGCAACCGG |
| Full CART | | GGGGATCGCTCAGACTGTCCTGTGCGGCGTCAGGCTTCACCTTCTCGAGCTAC |
| | | GCCATGTCATGGGTCAGACAGGCCCCTGGAAAGGGTCTGGAATGGGTGTCCGC |
| | | CATTTCCGGGAGCGGGGGATCTACATACTACGCCGATAGCGTGAAGGGCCGCT |
| | | TCACCATTTCCCGGGACAACTCCAAGAACACTCTCTATCTGCAAATGAACTCC |
| | | CTCCGCGCTGAGGACACTGCCGTGTACTACTGCGCCAAAATCCCTCAGACCGG |
| | | CACCTTCGACTACTGGGGACAGGGGACTCTGGTCACCGTCAGCAGCGGTGGCG |
| | | GAGGTTCGGGGGGAGGAGGAAGCGGCGGCGGAGGGTCCGAGATTGTGCTGACC |
| | | CAGTCACCCGGCACTTTGTCCCTGTCGCCTGGAGAAAGGGCCACCCTTTCCTG |
| | | CCGGGCATCCCAATCCGTGTCCTCCTCGTACCTGGCCTGGTACCAGCAGAGGC |
| | | CCGGACAGGCCCCACGGCTTCTGATCTACGGAGCAAGCAGCCGCGCGACCGGT |
| | | ATCCCGGACCGGTTTTCGGGCTCGGGCTCAGGAACTGACTTCACCCTCACCAT |
| | | CTCCCGCCTGGAACCCGAAGATTTCGCTGTGTATTACTGCCAGCACTACGGCA |
| | | GCTCCCCGTCCTGGACGTTCGGCCAGGGAACTCGGCTGGAGATCAAGACCACT |
| | | ACCCCAGCACCGAGGCCACCCACCCCGGCTCCTACCATCGCCTCCCAGCCTCT |
| | | GTCCCTGCGTCCGGAGGCATGTAGACCCGCAGCTGGTGGGGCCGTGCATACCC |
| | | GGGGTCTTGACTTCGCCTGCGATATCTACATTTGGGCCCCTCTGGCTGGTACT |
| | | TGCGGGGTCCTGCTGCTTTCACTCGTGATCACTCTTTACTGTAAGCGCGGTCG |
| | | GAAGAAGCTGCTGTACATCTTTAAGCAACCCTTCATGAGGCCTGTGCAGACTA |
| | | CTCAAGAGGAGGACGGCTGTTCATGCCGGTTCCCAGAGGAGGAGGAAGGCGGC |
| | | TGCGAACTGCGCGTGAAATTCAGCCGCAGCGCAGATGCTCCAGCCTACAAGCA |
| | | GGGGCAGAACCAGCTCTACAACGAACTCAATCTTGGTCGGAGAGAGGAGTACG |
| | | ACGTGCTGGACAAGCGGAGAGGACGGGACCCAGAAATGGGCGGGAAGCCGCGC |
| | | AGAAAGAATCCCCAAGAGGGCCTGTACAACGAGCTCCAAAAGGATAAGATGGC |
| | | AGAAGCCTATAGCGAGATTGGTATGAAAGGGGAACGCAGAAGAGGCAAAGGCC |
| | | ACGACGGACTGTACCAGGGACTCAGCACCGCCACCAAGGACACCTATGACGCT |
| | | CTTCACATGCAGGCCCTGCCGCCTCGG |

BCMA_EBB-C1978-A10

| | | |
|---|---|---|
| BCMA_EBB- | 145 | EVQLVETGGGLVQPGGSLRLSCAASGFTFSSYAMSWVRQAPGKGLEW |
| C1978-A10- | | VSAISGSGGSTYYADSVKGRFTMSRENDKNSVFLQMNSLRVEDTGVY |
| aa | | YCARANYKRELRYYYGMDVWGQGTMVTVSSGGGGSGGGGSGGGGS |
| ScFv domain | | EIVMTQSPGTLSLSPGESATLSCRASQRVASNYLAWYQHKPGQAPSLLI |
| | | SGASSRATGVPDRFSGSGSGTDFTLAISRLEPEDSAVYYCQHYDSSPSW |
| | | TFGQGTKVEIK |
| BCMA_EBB- | 166 | GAAGTGCAACTGGTGGAAACCGGTGGAGGACTCGTGCAGCCTGGCGGCAGCCT |
| C1978-A10- | | CCGGCTGAGCTGCGCCGCTTCGGGATTCACCTTTTCCTCCTACGCGATGTCTT |
| nt | | GGGTCAGACAGGCCCCCGGAAAGGGGCTGGAATGGGTGTCAGCCATCTCCGGC |
| ScFv domain | | TCCGGCGGATCAACGTACTACGCCGACTCCGTGAAAGGCCGGTTCACCATGTC |
| | | GCGCGAGAATGACAAGAACTCCGTGTTCCTGCAAATGAACTCCCTGAGGGTGG |
| | | AGGACACCGGAGTGTACTATTGTGCGCGCGCCAACTACAAGAGAGAGCTGCGG |
| | | TACTACTACGGAATGGACGTCTGGGGACAGGGAACTATGGTGACCGTGTCATC |
| | | CGGTGGAGGGGGAAGCGGCGGTGGAGGCAGCGGGGGCGGGGGTTCAGAAATTG |
| | | TCATGACCCAGTCCCCGGGAACTCTTTCCCTCTCCCCCGGGGAATCCGCGACT |
| | | TTGTCCTGCCGGGCCAGCCAGCGCGTGGCCTCGAACTACCTCGCATGGTACCA |
| | | GCATAAGCCAGGCCAAGCCCCTTCCCTGCTGATTTCCGGGGCTAGCAGCCGCG |
| | | CCACTGGCGTGCCGGATAGGTTCTCGGGAAGCGGCTCGGGTACCGATTTCACC |
| | | CTGGCAATCTCGCGGCTGGAACCGGAGGATTCGGCCGTGTACTACTGCCAGCA |
| | | CTATGACTCATCCCCCTCCTGGACATTCGGACAGGGCACCAAGGTCGAGATCA |
| | | AG |
| BCMA_EBB- | 187 | EVQLVETGGGLVQPGGSLRLSCAASGFTFSSYAMSWVRQAPGKGLEWVSAISG |
| C1978-A10- | | SGGSTYYADSVKGRFTMSRENDKNSVFLQMNSLRVEDTGVYYCARANYKRELR |
| aa | | YYYGMDVWGQGTMVTVSS |
| VH | | |
| BCMA_EBB- | 208 | EIVMTQSPGTLSLSPGESATLSCRASQRVASNYLAWYQHKPGQAPSLLISGAS |
| C1978-A10- | | SRATGVPDRFSGSGSGTDFTLAISRLEPEDSAVYYCQHYDSSPSWTFGQGTKV |
| aa | | EIK |
| VL | | |
| BCMA_EBB- | 229 | MALPVTALLLPLALLLHAARPEVQLVETGGGLVQPGGSLRLSCAASGF |
| C1978-A10- | | TFSSYAMSWVRQAPGKGLEWVSAISGSGGSTYYADSVKGRFTMSREN |
| aa | | DKNSVFLQMNSLRVEDTGVYYCARANYKRELRYYYGMDVWGQGTM |
| Full CART | | VTVSSGGGGSGGGGSGGGGSEIVMTQSPGTLSLSPGESATLSCRASQR |
| | | VASNYLAWYQHKPGQAPSLLISGASSRATGVPDRFSGSGSGTDFTLAIS |
| | | RLEPEDSAVYYCQHYDSSPSWTFGQGTKVEIKTTTPAPRPPTPAPTIAS |
| | | QPLSLRPEACRPAAGGAVHTRGLDFACDIYIWAPLAGTCGVLLLSLVIT |
| | | LYCKRGRKKLLYIFKQPFMRPVQTTQEEDGCSCRFPEEEEGGCELRVK |
| | | FSRSADAPAYKQGQNQLYNELNLGRREEYDVLDKRRGRDPEMGGKP |
| | | RRKNPQEGLYNELQKDKMAEAYSEIGMKGERRRGKGHDGLYQGLST |
| | | ATKDTYDALHMQALPPR |
| BCMA_EBB- | 250 | ATGGCCCTCCCTGTCACCGCCCTGCTGCTTCCGCTGGCTCTTCTGCTCCACGC |
| C1978-A10- | | CGCTCGGCCCGAAGTGCAACTGGTGGAAACCGGTGGAGGACTCGTGCAGCCTG |
| nt | | GCGGCAGCCTCCGGCTGAGCTGCGCCGCTTCGGGATTCACCTTTTCCTCCTAC |
| Full CART | | GCGATGTCTTGGGTCAGACAGGCCCCCGGAAAGGGGCTGGAATGGGTGTCAGC |
| | | CATCTCCGGCTCCGGCGGATCAACGTACTACGCCGACTCCGTGAAAGGCCGGT |
| | | TCACCATGTCGCGCGAGAATGACAAGAACTCCGTGTTCCTGCAAATGAACTCC |
| | | CTGAGGGTGGAGGACACCGGAGTGTACTATTGTGCGCGCGCCAACTACAAGAG |
| | | AGAGCTGCGGTACTACTACGGAATGGACGTCTGGGGACAGGGAACTATGGTGA |
| | | CCGTGTCATCCGGTGGAGGGGGAAGCGGCGGTGGAGGCAGCGGGGGCGGGGGT |
| | | TCAGAAATTGTCATGACCCAGTCCCCGGGAACTCTTTCCCTCTCCCCCGGGGA |
| | | ATCCGCGACTTTGTCCTGCCGGGCCAGCCAGCGCGTGGCCTCGAACTACCTCG |
| | | CATGGTACCAGCATAAGCCAGGCCAAGCCCCTTCCCTGCTGATTTCCGGGGCT |
| | | AGCAGCCGCGCCACTGGCGTGCCGGATAGGTTCTCGGGAAGCGGCTCGGGTAC |
| | | CGATTTCACCCTGGCAATCTCGCGGCTGGAACCGGAGGATTCGGCCGTGTACT |
| | | ACTGCCAGCACTATGACTCATCCCCCTCCTGGACATTCGGACAGGGCACCAAG |
| | | GTCGAGATCAAGACCACTACCCCAGCACCGAGGCCACCCACCCCGGCTCCTAC |
| | | CATCGCCTCCCAGCCTCTGTCCCTGCGTCCGGAGGCATGTAGACCCGCAGCTG |
| | | GTGGGGCCGTGCATACCCGGGGTCTTGACTTCGCCTGCGATATCTACATTTGG |
| | | GCCCCTCTGGCTGGTACTTGCGGGGTCCTGCTGCTTTCACTCGTGATCACTCT |
| | | TTACTGTAAGCGCGGTCGGAAGAAGCTGCTGTACATCTTTAAGCAACCCTTCA |
| | | TGAGGCCTGTGCAGACTACTCAAGAGGAGGACGGCTGTTCATGCCGGTTCCCA |
| | | GAGGAGGAGGAAGGCGGCTGCGAACTGCGCGTGAAATTCAGCCGCAGCGCAGA |
| | | TGCTCCAGCCTACAAGCAGGGGCAGAACCAGCTCTACAACGAACTCAATCTTG |
| | | GTCGGAGAGAGGAGTACGACGTGCTGGACAAGCGGAGAGGACGGGACCCAGAA |
| | | ATGGGCGGGAAGCCGCGCAGAAAGAATCCCCAAGAGGGCCTGTACAACGAGCT |
| | | CCAAAAGGATAAGATGGCAGAAGCCTATAGCGAGATTGGTATGAAAGGGGAAC |
| | | GCAGAAGAGGCAAAGGCCACGACGGACTGTACCAGGGACTCAGCACCGCCACC |
| | | AAGGACACCTATGACGCTCTTCACATGCAGGCCCTGCCGCCTCGG |

BCMA_EBB-C1978-D4

| | | |
|---|---|---|
| BCMA_EBB- | 146 | EVQLLETGGGLVQPGGSLRLSCAASGFSFSSYAMSWVRQAPGKGLEWVSAISG |
| C1978-D4- aa | | SGGSTYYADSVKGRFTISRDNSKNTLYLQMNSLRAEDTAVYYCAKALVGATGA |
| ScFv domain | | FDIWGQGTLVTVSSGGGGSGGGGSGGGGSEIVLTQSPGTLSLSPGERATLSCR |
| | | ASQSLSSNFLAWYQQKPGQAPGLLIYGASNWATGTPDRFSGSGSGTDFTLTIT |
| | | RLEPEDFAVYYCQYYGTSPMYTFGQGTKVEIK |
| BCMA_EBB- | 167 | GAAGTGCAGCTGCTCGAAACCGGTGGAGGGCTGGTGCAGCCAGGGGGCTCCCT |
| C1978-D4- nt | | GAGGCTTTCATGCGCCGCTAGCGGATTCTCCTTCTCCTCTTACGCCATGTCGT |
| ScFv domain | | GGGTCCGCCAAGCCCCTGGAAAAGGCCTGGAATGGGTGTCCGCGATTTCCGGG |
| | | AGCGGAGGTTCGACCTATTACGCCGACTCCGTGAAGGGCCGCTTTACCATCTC |
| | | CCGGGATAACTCCAAGAACACTCTGTACCTCCAAATGAACTCGCTGAGAGCCG |
| | | AGGACACCGCCGTGTATTACTGCGCGAAGGCGCTGGTCGGCGCGACTGGGGCA |
| | | TTCGACATCTGGGGACAGGGAACTCTTGTGACCGTGTCGAGCGGAGGCGGCGG |
| | | CTCCGGCGGAGGAGGGAGCGGGGGCGGTGGTTCCGAAATCGTGTTGACTCAGT |
| | | CCCCGGGAACCCTGAGCTTGTCACCCGGGGAGCGGGCCACTCTCTCCTGTCGC |
| | | GCCTCCCAATCGCTCTCATCCAATTTCCTGGCCTGGTACCAGCAGAAGCCCGG |
| | | ACAGGCCCCGGGCCTGCTCATCTACGGCGCTTCAAACTGGGCAACGGGAACCC |
| | | CTGATCGGTTCAGCGGAAGCGGATCGGGTACTGACTTTACCCTGACCATCACC |
| | | AGACTGGAACCGGAGGACTTCGCCGTGTACTACTGCCAGTACTACGGCACCTC |
| | | CCCCATGTACACATTCGGACAGGGTACCAAGGTCGAGATTAAG |
| BCMA_EBB- | 188 | EVQLLETGGGLVQPGGSLRLSCAASGFSFSSYAMSWVRQAPGKGLEWVSAISG |
| C1978-D4- aa | | SGGSTYYADSVKGRFTISRDNSKNTLYLQMNSLRAEDTAVYYCAKALVGATGA |
| VH | | FDIWGQGTLVTVSS |
| BCMA_EBB- | 209 | EIVLTQSPGTLSLSPGERATLSCRASQSLSSNFLAWYQQKPGQAPGLLIYGAS |
| C1978-D4- aa | | NWATGTPDRFSGSGSGTDFTLTITRLEPEDFAVYYCQYYGTSPMYTFGQGTKV |
| VL | | EIK |
| BCMA_EBB- | 230 | MALPVTALLLPLALLLHAARPEVQLLETGGGLVQPGGSLRLSCAASGFSFSSY |
| C1978-D4- aa | | AMSWVRQAPGKGLEWVSAISGSGGSTYYADSVKGRFTISRDNSKNTLYLQMNS |
| Full CART | | LRAEDTAVYYCAKALVGATGAFDIWGQGTLVTVSSGGGGSGGGGSGGGGSEIV |
| | | LTQSPGTLSLSPGERATLSCRASQSLSSNFLAWYQQKPGQAPGLLIYGASNWA |
| | | TGTPDRFSGSGSGTDFTLTITRLEPEDFAVYYCQYYGTSPMYTFGQGTKVEIK |
| | | TTTPAPRPPTPAPTIASQPLSLRPEACRPAAGGAVHTRGLDFACDIYIWAPLA |
| | | GTCGVLLLSLVITLYCKRGRKKLLYIFKQPFMRPVQTTQEEDGCSCRFPEEEE |
| | | GGCELRVKFSRSADAPAYKQGQNQLYNELNLGRREEYDVLDKRRGRDPEMGGK |
| | | PRRKNPQEGLYNELQKDKMAEAYSEIGMKGERRRGKGHDGLYQGLSTATKDTY |
| | | DALHMQALPPR |
| BCMA_EBB- | 251 | ATGGCCCTCCCTGTCACCGCCCTGCTGCTTCCGCTGGCTCTTCTGCTCCACGC |
| C1978-D4- nt | | CGCTCGGCCCGAAGTGCAGCTGCTCGAAACCGGTGGAGGGCTGGTGCAGCCAG |
| Full CART | | GGGGCTCCCTGAGGCTTTCATGCGCCGCTAGCGGATTCTCCTTCTCCTCTTAC |
| | | GCCATGTCGTGGGTCCGCCAAGCCCCTGGAAAAGGCCTGGAATGGGTGTCCGC |
| | | GATTTCCGGGAGCGGAGGTTCGACCTATTACGCCGACTCCGTGAAGGGCCGCT |
| | | TTACCATCTCCCGGGATAACTCCAAGAACACTCTGTACCTCCAAATGAACTCG |
| | | CTGAGAGCCGAGGACACCGCCGTGTATTACTGCGCGAAGGCGCTGGTCGGCGC |
| | | GACTGGGGCATTCGACATCTGGGGACAGGGAACTCTTGTGACCGTGTCGAGCG |
| | | GAGGCGGCGGCTCCGGCGGAGGAGGGAGCGGGGGCGGTGGTTCCGAAATCGTG |
| | | TTGACTCAGTCCCCGGGAACCCTGAGCTTGTCACCCGGGGAGCGGGCCACTCT |
| | | CTCCTGTCGCGCCTCCCAATCGCTCTCATCCAATTTCCTGGCCTGGTACCAGC |
| | | AGAAGCCCGGACAGGCCCCGGGCCTGCTCATCTACGGCGCTTCAAACTGGGCA |
| | | ACGGGAACCCCTGATCGGTTCAGCGGAAGCGGATCGGGTACTGACTTTACCCT |
| | | GACCATCACCAGACTGGAACCGGAGGACTTCGCCGTGTACTACTGCCAGTACT |
| | | ACGGCACCTCCCCCATGTACACATTCGGACAGGGTACCAAGGTCGAGATTAAG |
| | | ACCACTACCCCAGCACCGAGGCCACCCACCCCGGCTCCTACCATCGCCTCCCA |
| | | GCCTCTGTCCCTGCGTCCGGAGGCATGTAGACCCGCAGCTGGTGGGGCCGTGC |
| | | ATACCCGGGGTCTTGACTTCGCCTGCGATATCTACATTTGGGCCCCTCTGGCT |
| | | GGTACTTGCGGGGTCCTGCTGCTTTCACTCGTGATCACTCTTTACTGTAAGCG |
| | | CGGTCGGAAGAAGCTGCTGTACATCTTTAAGCAACCCTTCATGAGGCCTGTGC |
| | | AGACTACTCAAGAGGAGGACGGCTGTTCATGCCGGTTCCCAGAGGAGGAGGAA |
| | | GGCGGCTGCGAACTGCGCGTGAAATTCAGCCGCAGCGCAGATGCTCCAGCCTA |
| | | CAAGCAGGGGCAGAACCAGCTCTACAACGAACTCAATCTTGGTCGGAGAGAGG |
| | | AGTACGACGTGCTGGACAAGCGGAGAGGACGGGACCCAGAAATGGGCGGGAAG |
| | | CCGCGCAGAAAGAATCCCCAAGAGGGCCTGTACAACGAGCTCCAAAAGGATAA |
| | | GATGGCAGAAGCCTATAGCGAGATTGGTATGAAAGGGGAACGCAGAAGAGGCA |
| | | AAGGCCACGACGGACTGTACCAGGGACTCAGCACCGCCACCAAGGACACCTAT |
| | | GACGCTCTTCACATGCAGGCCCTGCCGCCTCGG |

BCMA_EBB-C1980-A2

| | | |
|---|---|---|
| BCMA_EBB- | 147 | EVQLLESGGGLVQPGGSLRLSCAASGFTFSSYAMSWVRQAPGKGLEWVSAISG |
| C1980-A2- aa | | SGGSTYYADSVKGRFTISRDNSKNTLYLQMNSLRAEDTAVYYCVLWFGEGFDP |
| ScFv domain | | WGQGTLVTVSSGGGGSGGGGSGGGGSDIVLTQSPLSLPVTPGEPASISCRSSQ |
| | | SLLHSNGYNYLDWYLQKPGQSPQLLIYLGSNRASGVPDRFSGSGSGTDFTLKI |
| | | SRVEAEDVGVYYCMQALQTPLTFGGGTKVDIK |
| BCMA_EBB- | 168 | GAAGTGCAGCTGCTTGAGAGCGGTGGAGGTCTGGTGCAGCCCGGGGGATCACT |
| C1980-A2- nt | | GCGCCTGTCCTGTGCCGCGTCCGGTTTCACTTTCTCCTCGTACGCCATGTCGT |
| ScFv domain | | GGGTCAGACAGGCACCGGGAAAGGGACTGGAATGGGTGTCAGCCATTTCGGGT |
| | | TCGGGGGGCAGCACCTACTACGCTGACTCCGTGAAGGGCCGGTTCACCATTTC |
| | | CCGCGACAACTCCAAGAACACCTTGTACCTCCAAATGAACTCCCTGCGGGCCG |
| | | AAGATACCGCCGTGTATTACTGCGTGCTGTGGTTCGGAGAGGGATTCGACCCG |
| | | TGGGGACAAGGAACACTCGTGACTGTGTCATCCGGCGGAGGCGGCAGCGGTGG |
| | | CGGCGGTTCCGGCGGCGGCGGATCTGACATCGTGTTGACCCAGTCCCCTCTGA |
| | | GCCTGCCGGTCACTCCTGGCGAACCAGCCAGCATCTCCTGCCGGTCGAGCCAG |
| | | TCCCTCCTGCACTCCAATGGGTACAACTACCTCGATTGGTATCTGCAAAAGCC |
| | | GGGCCAGAGCCCCCAGCTGCTGATCTACCTTGGGTCAAACCGCGCTTCCGGGG |
| | | TGCCTGATAGATTCTCCGGGTCCGGGAGCGGAACCGACTTTACCCTGAAAATC |
| | | TCGAGGGTGGAGGCCGAGGACGTCGGAGTGTACTACTGCATGCAGGCGCTCCA |
| | | GACTCCCCTGACCTTCGGAGGAGGAACGAAGGTCGACATCAAGA |
| BCMA_EBB- | 189 | EVQLLESGGGLVQPGGSLRLSCAASGFTFSSYAMSWVRQAPGKGLEWVSAISG |
| C1980-A2- aa | | SGGSTYYADSVKGRFTISRDNSKNTLYLQMNSLRAEDTAVYYCVLWFGEGFDP |
| VH | | WGQGTLVTVSS |
| BCMA_EBB- | 210 | DIVLTQSPLSLPVTPGEPASISCRSSQSLLHSNGYNYLDWYLQKPGQSPQLLI |
| C1980-A2- aa | | YLGSNRASGVPDRFSGSGSGTDFTLKISRVEAEDVGVYYCMQALQTPLTFGGG |
| VL | | TKVDIK |
| BCMA_EBB- | 231 | MALPVTALLLPLALLLHAARPEVQLLESGGGLVQPGGSLRLSCAASGFTFSSY |
| C1980-A2- aa | | AMSWVRQAPGKGLEWVSAISGSGGSTYYADSVKGRFTISRDNSKNTLYLQMNS |
| Full CART | | LRAEDTAVYYCVLWFGEGFDPWGQGTLVTVSSGGGGSGGGGSGGGGSDIVLTQ |
| | | SPLSLPVTPGEPASISCRSSQSLLHSNGYNYLDWYLQKPGQSPQLLIYLGSNR |
| | | ASGVPDRFSGSGSGTDFTLKISRVEAEDVGVYYCMQALQTPLTFGGGTKVDIK |
| | | TTTPAPRPPTPAPTIASQPLSLRPEACRPAAGGAVHTRGLDFACDIYIWAPLA |
| | | GTCGVLLLSLVITLYCKRGRKKLLYIFKQPFMRPVQTTQEEDGCSCRFPEEEE |
| | | GGCELRVKFSRSADAPAYKQGQNQLYNELNLGRREEYDVLDKRRGRDPEMGGK |
| | | PRRKNPQEGLYNELQKDKMAEAYSEIGMKGERRRGKGHDGLYQGLSTATKDTY |
| | | DALHMQALPPR |
| BCMA_EBB- | 252 | ATGGCCCTCCCTGTCACCGCCCTGCTGCTTCCGCTGGCTCTTCTGCTCCACGC |
| C1980-A2- nt | | CGCTCGGCCCGAAGTGCAGCTGCTTGAGAGCGGTGGAGGTCTGGTGCAGCCCG |
| Full CART | | GGGGATCACTGCGCCTGTCCTGTGCCGCGTCCGGTTTCACTTTCTCCTCGTAC |
| | | GCCATGTCGTGGGTCAGACAGGCACCGGGAAAGGGACTGGAATGGGTGTCAGC |
| | | CATTTCGGGTTCGGGGGGCAGCACCTACTACGCTGACTCCGTGAAGGGCCGGT |
| | | TCACCATTTCCCGCGACAACTCCAAGAACACCTTGTACCTCCAAATGAACTCC |
| | | CTGCGGGCCGAAGATACCGCCGTGTATTACTGCGTGCTGTGGTTCGGAGAGGG |
| | | ATTCGACCCGTGGGGACAAGGAACACTCGTGACTGTGTCATCCGGCGGAGGCG |
| | | GCAGCGGTGGCGGCGGTTCCGGCGGCGGCGGATCTGACATCGTGTTGACCCAG |
| | | TCCCCTCTGAGCCTGCCGGTCACTCCTGGCGAACCAGCCAGCATCTCCTGCCG |
| | | GTCGAGCCAGTCCCTCCTGCACTCCAATGGGTACAACTACCTCGATTGGTATC |
| | | TGCAAAAGCCGGGCCAGAGCCCCCAGCTGCTGATCTACCTTGGGTCAAACCGC |
| | | GCTTCCGGGGTGCCTGATAGATTCTCCGGGTCCGGGAGCGGAACCGACTTTAC |
| | | CCTGAAAATCTCGAGGGTGGAGGCCGAGGACGTCGGAGTGTACTACTGCATGC |
| | | AGGCGCTCCAGACTCCCCTGACCTTCGGAGGAGGAACGAAGGTCGACATCAAG |
| | | ACCACTACCCCAGCACCGAGGCCACCCACCCCGGCTCCTACCATCGCCTCCCA |
| | | GCCTCTGTCCCTGCGTCCGGAGGCATGTAGACCCGCAGCTGGTGGGGCCGTGC |
| | | ATACCCGGGGTCTTGACTTCGCCTGCGATATCTACATTTGGGCCCCTCTGGCT |
| | | GGTACTTGCGGGGTCCTGCTGCTTTCACTCGTGATCACTCTTTACTGTAAGCG |
| | | CGGTCGGAAGAAGCTGCTGTACATCTTTAAGCAACCCTTCATGAGGCCTGTGC |
| | | AGACTACTCAAGAGGAGGACGGCTGTTCATGCCGGTTCCCAGAGGAGGAGGAA |
| | | GGCGGCTGCGAACTGCGCGTGAAATTCAGCCGCAGCGCAGATGCTCCAGCCTA |
| | | CAAGCAGGGGCAGAACCAGCTCTACAACGAACTCAATCTTGGTCGGAGAGAGG |
| | | AGTACGACGTGCTGGACAAGCGGAGAGGACGGGACCCAGAAATGGGCGGGAAG |
| | | CCGCGCAGAAAGAATCCCCAAGAGGGCCTGTACAACGAGCTCCAAAAGGATAA |
| | | GATGGCAGAAGCCTATAGCGAGATTGGTATGAAAGGGGAACGCAGAAGAGGCA |
| | | AAGGCCACGACGGACTGTACCAGGGACTCAGCACCGCCACCAAGGACACCTAT |
| | | GACGCTCTTCACATGCAGGCCCTGCCGCCTCGG |

BCMA_EBB-C1981-C3

| | | |
|---|---|---|
| BCMA_EBB- | 148 | QVQLVESGGGLVQPGGSLRLSCAASGFTFSSYAMSWVRQAPGKGLEWVSAISG |
| C1981-C3- aa | | SGGSTYYADSVKGRFTISRDNSKNTLYLQMNSLRAEDTAVYYCAKVGYDSSGY |
| ScFv domain | | YRDYYGMDVWGQGTTVTVSSGGGGSGGGGSGGGGSEIVLTQSPGTLSLSPGER |
| | | ATLSCRASQSVSSSYLAWYQQKPGQAPRLLIYGTSSRATGISDRFSGSGSGTD |
| | | FTLTISRLEPEDFAVYYCQHYGNSPPKFTFGPGTKLEIK |
| BCMA_EBB- | 169 | CAAGTGCAGCTCGTGGAGTCAGGCGGAGGACTGGTGCAGCCCGGGGGCTCCCT |
| C1981-C3- nt | | GAGACTTTCCTGCGCGGCATCGGGTTTTACCTTCTCCTCCTATGCTATGTCCT |
| ScFv domain | | GGGTGCGCCAGGCCCCGGGAAAGGGACTGGAATGGGTGTCCGCAATCAGCGGT |
| | | AGCGGGGGCTCAACATACTACGCCGACTCCGTCAAGGGTCGCTTCACTATTTC |
| | | CCGGGACAACTCCAAGAATACCCTGTACCTCCAAATGAACAGCCTCAGGGCCG |
| | | AGGATACTGCCGTGTACTACTGCGCCAAAGTCGGATACGATAGCTCCGGTTAC |
| | | TACCGGGACTACTACGGAATGGACGTGTGGGGACAGGGCACCACCGTGACCGT |
| | | GTCAAGCGGCGGAGGCGGTTCAGGAGGGGGAGGCTCCGGCGGTGGAGGGTCCG |
| | | AAATCGTCCTGACTCAGTCGCCTGGCACTCTGTCGTTGTCCCCGGGGGAGCGC |
| | | GCTACCCTGTCGTGTCGGGCGTCGCAGTCCGTGTCGAGCTCCTACCTCGCGTG |
| | | GTACCAGCAGAAGCCCGGACAGGCCCCTAGACTTCTGATCTACGGCACTTCTT |
| | | CACGCGCCACCGGGATCAGCGACAGGTTCAGCGGCTCCGGCTCCGGGACCGAC |
| | | TTCACCCTGACCATTAGCCGGCTGGAGCCTGAAGATTTCGCCGTGTATTACTG |
| | | CCAACACTACGGAAACTCGCCGCCAAAGTTCACGTTCGGACCCGGAACCAAGC |
| | | TGGAAATCAAG |
| BCMA_EBB- | 190 | QVQLVESGGGLVQPGGSLRLSCAASGFTFSSYAMSWVRQAPGKGLEWVSAISG |
| C1981-C3- aa | | SGGSTYYADSVKGRFTISRDNSKNTLYLQMNSLRAEDTAVYYCAKVGYDSSGY |
| VH | | YRDYYGMDVWGQGTTVTVSS |
| BCMA_EBB- | 211 | EIVLTQSPGTLSLSPGERATLSCRASQSVSSSYLAWYQQKPGQAPRLLIYGTS |
| C1981-C3- aa | | SRATGISDRFSGSGSGTDFTLTISRLEPEDFAVYYCQHYGNSPPKFTFGPGTK |
| VL | | LEIK |
| BCMA_EBB- | 232 | MALPVTALLLPLALLLHAARPQVQLVESGGGLVQPGGSLRLSCAASGFTFSSY |
| C1981-C3- aa | | AMSWVRQAPGKGLEWVSAISGSGGSTYYADSVKGRFTISRDNSKNTLYLQMNS |
| Full CART | | LRAEDTAVYYCAKVGYDSSGYYRDYYGMDVWGQGTTVTVSSGGGGSGGGGSGG |
| | | GGSEIVLTQSPGTLSLSPGERATLSCRASQSVSSSYLAWYQQKPGQAPRLLIY |
| | | GTSSRATGISDRFSGSGSGTDFTLTISRLEPEDFAVYYCQHYGNSPPKFTFGP |
| | | GTKLEIKTTTPAPRPPTPAPTIASQPLSLRPEACRPAAGGAVHTRGLDFACDI |
| | | YIWAPLAGTCGVLLLSLVITLYCKRGRKKLLYIFKQPFMRPVQTTQEEDGCSC |
| | | RFPEEEEGGCELRVKFSRSADAPAYKQGQNQLYNELNLGRREEYDVLDKRRGR |
| | | DPEMGGKPRRKNPQEGLYNELQKDKMAEAYSEIGMKGERRRGKGHDGLYQGLS |
| | | TATKDTYDALHMQALPPR |
| BCMA_EBB- | 253 | ATGGCCCTCCCTGTCACCGCCCTGCTGCTTCCGCTGGCTCTTCTGCTCCACGC |
| C1981-C3- nt | | CGCTCGGCCCCAAGTGCAGCTCGTGGAGTCAGGCGGAGGACTGGTGCAGCCCG |
| Full CART | | GGGGCTCCCTGAGACTTTCCTGCGCGGCATCGGGTTTTACCTTCTCCTCCTAT |
| | | GCTATGTCCTGGGTGCGCCAGGCCCCGGGAAAGGGACTGGAATGGGTGTCCGC |
| | | AATCAGCGGTAGCGGGGGCTCAACATACTACGCCGACTCCGTCAAGGGTCGCT |
| | | TCACTATTTCCCGGGACAACTCCAAGAATACCCTGTACCTCCAAATGAACAGC |
| | | CTCAGGGCCGAGGATACTGCCGTGTACTACTGCGCCAAAGTCGGATACGATAG |
| | | CTCCGGTTACTACCGGGACTACTACGGAATGGACGTGTGGGGACAGGGCACCA |
| | | CCGTGACCGTGTCAAGCGGCGGAGGCGGTTCAGGAGGGGGAGGCTCCGGCGGT |
| | | GGAGGGTCCGAAATCGTCCTGACTCAGTCGCCTGGCACTCTGTCGTTGTCCCC |
| | | GGGGGAGCGCGCTACCCTGTCGTGTCGGGCGTCGCAGTCCGTGTCGAGCTCCT |
| | | ACCTCGCGTGGTACCAGCAGAAGCCCGGACAGGCCCCTAGACTTCTGATCTAC |
| | | GGCACTTCTTCACGCGCCACCGGGATCAGCGACAGGTTCAGCGGCTCCGGCTC |
| | | CGGGACCGACTTCACCCTGACCATTAGCCGGCTGGAGCCTGAAGATTTCGCCG |
| | | TGTATTACTGCCAACACTACGGAAACTCGCCGCCAAAGTTCACGTTCGGACCC |
| | | GGAACCAAGCTGGAAATCAAGACCACTACCCCAGCACCGAGGCCACCCACCCC |
| | | GGCTCCTACCATCGCCTCCCAGCCTCTGTCCCTGCGTCCGGAGGCATGTAGAC |
| | | CCGCAGCTGGTGGGGCCGTGCATACCCGGGGTCTTGACTTCGCCTGCGATATC |
| | | TACATTTGGGCCCCTCTGGCTGGTACTTGCGGGGTCCTGCTGCTTTCACTCGT |
| | | GATCACTCTTTACTGTAAGCGCGGTCGGAAGAAGCTGCTGTACATCTTTAAGC |
| | | AACCCTTCATGAGGCCTGTGCAGACTACTCAAGAGGAGGACGGCTGTTCATGC |
| | | CGGTTCCCAGAGGAGGAGGAAGGCGGCTGCGAACTGCGCGTGAAATTCAGCCG |
| | | CAGCGCAGATGCTCCAGCCTACAAGCAGGGGCAGAACCAGCTCTACAACGAAC |
| | | TCAATCTTGGTCGGAGAGAGGAGTACGACGTGCTGGACAAGCGGAGAGGACGG |
| | | GACCCAGAAATGGGCGGGAAGCCGCGCAGAAAGAATCCCCAAGAGGGCCTGTA |
| | | CAACGAGCTCCAAAAGGATAAGATGGCAGAAGCCTATAGCGAGATTGGTATGA |
| | | AAGGGGAACGCAGAAGAGGCAAAGGCCACGACGGACTGTACCAGGGACTCAGC |
| | | ACCGCCACCAAGGACACCTATGACGCTCTTCACATGCAGGCCCTGCCGCCTCG |
| | | G |

BCMA_EBB-C1978-G4

| | | |
|---|---|---|
| BCMA_EBB- | 149 | EVQLVESGGGLVQPGGSLRLSCAASGFTFSSYAMSWVRQAPGKGLEWVSAISG |
| C1978-G4- aa | | SGGSTYYADSVKGRFTISRDNSKNTLYLQMNSLRAEDTAVYYCAKMGWSSGYL |
| ScFv domain | | GAFDIWGQGTTVTVSSGGGGSGGGGSGGGGSEIVLTQSPGTLSLSPGERATLS |
| | | CRASQSVASSFLAWYQQKPGQAPRLLIYGASGRATGIPDRFSGSGSGTDFTLT |
| | | ISRLEPEDFAVYYCQHYGGSPRLTFGGGTKVDIK |
| BCMA_EBB- | 170 | GAAGTCCAACTGGTGGAGTCCGGGGGAGGGCTCGTGCAGCCCGGAGGCAGCCT |
| C1978-G4- nt | | TCGGCTGTCGTGCGCCGCCTCCGGGTTCACGTTCTCATCCTACGCGATGTCGT |
| ScFv domain | | GGGTCAGACAGGCACCAGGAAAGGGACTGGAATGGGTGTCCGCCATTAGCGGC |
| | | TCCGGCGGTAGCACCTACTATGCCGACTCAGTGAAGGGAAGGTTCACTATCTC |
| | | CCGCGACAACAGCAAGAACACCCTGTACCTCCAAATGAACTCTCTGCGGGCCG |
| | | AGGATACCGCGGTGTACTATTGCGCCAAGATGGGTTGGTCCAGCGGATACTTG |
| | | GGAGCCTTCGACATTTGGGGACAGGGCACTACTGTGACCGTGTCCTCCGGGGG |
| | | TGGCGGATCGGGAGGCGGCGGCTCGGGTGGAGGGGGTTCCGAAATCGTGTTGA |
| | | CCCAGTCACCGGGAACCCTCTCGCTGTCCCCGGGAGAACGGGCTACACTGTCA |
| | | TGTAGAGCGTCCCAGTCCGTGGCTTCCTCGTTCCTGGCCTGGTACCAGCAGAA |
| | | GCCGGGACAGGCACCCCGCCTGCTCATCTACGGAGCCAGCGGCCGGGCGACCG |
| | | GCATCCCTGACCGCTTCTCCGGTTCCGGCTCGGGCACCGACTTTACTCTGACC |
| | | ATTAGCAGGCTTGAGCCCGAGGATTTTGCCGTGTACTACTGCCAACACTACGG |
| | | GGGGAGCCCTCGCCTGACCTTCGGAGGCGGAACTAAGGTCGATATCAAAA |
| BCMA_EBB- | 191 | EVQLVESGGGLVQPGGSLRLSCAASGFTFSSYAMSWVRQAPGKGLEWVSAISG |
| C1978-G4- aa | | SGGSTYYADSVKGRFTISRDNSKNTLYLQMNSLRAEDTAVYYCAKMGWSSGYL |
| VH | | GAFDIWGQGTTVTVSS |
| BCMA_EBB- | 212 | EIVLTQSPGTLSLSPGERATLSCRASQSVASSFLAWYQQKPGQAPRLLIYGAS |
| C1978-G4- aa | | GRATGIPDRFSGSGSGTDFTLTISRLEPEDFAVYYCQHYGGSPRLTFGGGTKV |
| VL | | DIK |
| BCMA_EBB- | 233 | MALPVTALLLPLALLLHAARPEVQLVESGGGLVQPGGSLRLSCAASGFTFSSY |
| C1978-G4- aa | | AMSWVRQAPGKGLEWVSAISGSGGSTYYADSVKGRFTISRDNSKNTLYLQMNS |
| Full CART | | LRAEDTAVYYCAKMGWSSGYLGAFDIWGQGTTVTVSSGGGGSGGGGSGGGGSE |
| | | IVLTQSPGTLSLSPGERATLSCRASQSVASSFLAWYQQKPGQAPRLLIYGASG |
| | | RATGIPDRFSGSGSGTDFTLTISRLEPEDFAVYYCQHYGGSPRLTFGGGTKVD |
| | | IKTTTPAPRPPTPAPTIASQPLSLRPEACRPAAGGAVHTRGLDFACDIYIWAP |
| | | LAGTCGVLLLSLVITLYCKRGRKKLLYIFKQPFMRPVQTTQEEDGCSCRFPEE |
| | | EEGGCELRVKFSRSADAPAYKQGQNQLYNELNLGRREEYDVLDKRRGRDPEMG |
| | | GKPRRKNPQEGLYNELQKDKMAEAYSEIGMKGERRRGKGHDGLYQGLSTATKD |
| | | TYDALHMQALPPR |
| BCMA_EBB- | 254 | ATGGCCCTCCCTGTCACCGCCCTGCTGCTTCCGCTGGCTCTTCTGCTCCACGC |
| C1978-G4- nt | | CGCTCGGCCCGAAGTCCAACTGGTGGAGTCCGGGGGAGGGCTCGTGCAGCCCG |
| Full CART | | GAGGCAGCCTTCGGCTGTCGTGCGCCGCCTCCGGGTTCACGTTCTCATCCTAC |
| | | GCGATGTCGTGGGTCAGACAGGCACCAGGAAAGGGACTGGAATGGGTGTCCGC |
| | | CATTAGCGGCTCCGGCGGTAGCACCTACTATGCCGACTCAGTGAAGGGAAGGT |
| | | TCACTATCTCCCGCGACAACAGCAAGAACACCCTGTACCTCCAAATGAACTCT |
| | | CTGCGGGCCGAGGATACCGCGGTGTACTATTGCGCCAAGATGGGTTGGTCCAG |
| | | CGGATACTTGGGAGCCTTCGACATTTGGGGACAGGGCACTACTGTGACCGTGT |
| | | CCTCCGGGGGTGGCGGATCGGGAGGCGGCGGCTCGGGTGGAGGGGGTTCCGAA |
| | | ATCGTGTTGACCCAGTCACCGGGAACCCTCTCGCTGTCCCCGGGAGAACGGGC |
| | | TACACTGTCATGTAGAGCGTCCCAGTCCGTGGCTTCCTCGTTCCTGGCCTGGT |
| | | ACCAGCAGAAGCCGGGACAGGCACCCCGCCTGCTCATCTACGGAGCCAGCGGC |
| | | CGGGCGACCGGCATCCCTGACCGCTTCTCCGGTTCCGGCTCGGGCACCGACTT |
| | | TACTCTGACCATTAGCAGGCTTGAGCCCGAGGATTTTGCCGTGTACTACTGCC |
| | | AACACTACGGGGGGAGCCCTCGCCTGACCTTCGGAGGCGGAACTAAGGTCGAT |
| | | ATCAAAACCACTACCCCAGCACCGAGGCCACCCACCCCGGCTCCTACCATCGC |
| | | CTCCCAGCCTCTGTCCCTGCGTCCGGAGGCATGTAGACCCGCAGCTGGTGGGG |
| | | CCGTGCATACCCGGGGTCTTGACTTCGCCTGCGATATCTACATTTGGGCCCCT |
| | | CTGGCTGGTACTTGCGGGGTCCTGCTGCTTTCACTCGTGATCACTCTTTACTG |
| | | TAAGCGCGGTCGGAAGAAGCTGCTGTACATCTTTAAGCAACCCTTCATGAGGC |
| | | CTGTGCAGACTACTCAAGAGGAGGACGGCTGTTCATGCCGGTTCCCAGAGGAG |
| | | GAGGAAGGCGGCTGCGAACTGCGCGTGAAATTCAGCCGCAGCGCAGATGCTCC |
| | | AGCCTACAAGCAGGGGCAGAACCAGCTCTACAACGAACTCAATCTTGGTCGGA |
| | | GAGAGGAGTACGACGTGCTGGACAAGCGGAGAGGACGGGACCCAGAAATGGGC |
| | | GGGAAGCCGCGCAGAAAGAATCCCCAAGAGGGCCTGTACAACGAGCTCCAAAA |
| | | GGATAAGATGGCAGAAGCCTATAGCGAGATTGGTATGAAAGGGGAACGCAGAA |
| | | GAGGCAAAGGCCACGACGGACTGTACCAGGGACTCAGCACCGCCACCAAGGAC |
| | | ACCTATGACGCTCTTCACATGCAGGCCCTGCCGCCTCGG |

[0353] In embodiments, additional exemplary BCMA CAR constructs are generated using the VH and VL sequences from PCT Publication WO2012/0163805 (the contents of which are hereby incorporated by reference in its entirety), e.g., based upon the results from the pBCMA3 and pBCMA4 CARs described in Examples 2 and 3. A schematic of the exemplary BCMA constructs (BCMA-3NP and BCMA-4NP) is shown in FIG. 10A. The two constructs differ in the orientation of the VH and VL chains (FIG. 10B). Exemplary BCMA CAR constructs and their corresponding DNA ID are shown below in Table 3.

TABLE 3
Tool CAR construct IDs

| | | |
|---|---|---|
| Nickname | Novartis ID | DNA2.0 ID |

| | |
|---|---|
| BCMA-3NP | 126022 |
| BCMA-4NP | 126021 |

[0354] In embodiments, additional exemplary BCMA CAR constructs can also be generated using the VH and VL sequences found in Table 16. The amino acid sequences of exemplary scFv domains comprising the VH and VL domains and a linker sequence, and full-length CARs are also found in Table 16.

TABLE 16
Additional exemplary BCMA CAR sequences

| | | SEQ |
|---|---|---|
| | | ID |
| Name | Sequence | NO: |
| A7D12.2 | QIQLVQSGPDLKKPGETVKLSCKASGYTFTNFGMNWVKQAPGKGFKWMAWINTYTGESYFA | 255 |
| VH | DDFKGRFAFSVETSATTAYLQINNLKTEDTATYFCARGEIYYGYDGGFAYWGQGTLVTVSA | |
| A7D12.2 | DVVMTQSHRFMSTSVGDRVSITCRASQDVNTAVSWYQQKPGQSPKLLIFSASYRYTGVPDR | 259 |
| VL | FTGSGSGADFTLTISSVQAEDLAVYYCQQHYSTPWTFGGGTKLDIK | |
| A7D12.2 | QIQLVQSGPDLKKPGETVKLSCKASGYTFTNFGMNWVKQAPGKGFKWMAWINTYTGESYFA | 263 |
| scFv | DDFKGRFAFSVETSATTAYLQINNLKTEDTATYFCARGEIYYGYDGGFAYWGQGTLVTVSA | |
| domain | GGGGSGGGGSGGGGSDVVMTQSHRFMSTSVGDRVSITCRASQDVNTAVSWYQQKPGQSPKL | |
| | LIFSASYRYTGVPDRFTGSGSGADFTLTISSVQAEDLAVYYCQQHYSTPWTFGGGTKLDIK | |
| A7D12.2 | QIQLVQSGPDLKKPGETVKLSCKASGYTFTNFGMNWVKQAPGKGFKWMAWINTYTGESYFA | 267 |
| Full | DDFKGRFAFSVETSATTAYLQINNLKTEDTATYFCARGEIYYGYDGGFAYWGQGTLVTVSA | |
| CART | GGGGSGGGGSGGGGSDVVMTQSHRFMSTSVGDRVSITCRASQDVNTAVSWYQQKPGQSPKL | |
| | LIFSASYRYTGVPDRFTGSGSGADFTLTISSVQAEDLAVYYCQQHYSTPWTFGGGTKLDIK | |
| | TTTPAPRPPTPAPTIASQPLSLRPEACRPAAGGAVHTRGLDFACDIYIWAPLAGTCGVLLL | |
| | SLVITLYCKRGRKKLLYIFKQPFMRPVQTTQEEDGCSCRFPEEEEGGCELRVKFSRSADAP | |
| | AYKQGQNQLYNELNLGRREEYDVLDKRRGRDPEMGGKPRRKNPQEGLYNELQKDKMAEAYS | |
| | EIGMKGERRRGKGHDGLYQGLSTATKDTYDALHMQALPPR | |
| C11D5.3 | QIQLVQSGPELKKPGETVKISCKASGYTFTDYSINWVKRAPGKGLKWMGWINTETREPAYA | 256 |
| VH | YDFRGRFAFSLETSASTAYLQINNLKYEDTATYFCALDYSYAMDYWGQGTSVTVSS | |
| C11D5.3 | DIVLTQSPASLAMSLGKRATISCRASESVSVIGAHLIHWYQQKPGQPPKLLIYLASNLETG | 260 |
| VL | VPARFSGSGSGTDFTLTIDPVEEDDVAIYSCLQSRIFPRTFGGGTKLEIK | |
| C11D53 | QIQLVQSGPELKKPGETVKISCKASGYTFTDYSINWVKRAPGKGLKWMGWINTETREPAYA | 264 |
| scFv | YDFRGRFAFSLETSASTAYLQINNLKYEDTATYFCALDYSYAMDYWGQGTSVTVSSGGGGS | |
| domain | GGGGSGGGGSQIQLVQSGPELKKPGETVKISCKASGYTFTDYSINWVKRAPGKGLKWMGWI | |
| | NTETREPAYAYDFRGRFAFSLETSASTAYLQINNLKYEDTATYFCALDYSYAMDYWGQGTS | |
| | VTVSS | |
| C11D53 | QIQLVQSGPELKKPGETVKISCKASGYTFTDYSINWVKRAPGKGLKWMGWINTETREPAYA | 268 |
| Full | YDFRGRFAFSLETSASTAYLQINNLKYEDTATYFCALDYSYAMDYWGQGTSVTVSSGGGGS | |
| CART | GGGGSGGGGSQIQLVQSGPELKKPGETVKISCKASGYTFTDYSINWVKRAPGKGLKWMGWI | |
| | NTETREPAYAYDFRGRFAFSLETSASTAYLQINNLKYEDTATYFCALDYSYAMDYWGQGTS | |
| | VTVSSTTTPAPRPPTPAPTIASQPLSLRPEACRPAAGGAVHTRGLDFACDIYIWAPLAGTC | |
| | GVLLLSLVITLYCKRGRKKLLYIFKQPFMRPVQTTQEEDGCSCRFPEEEEGGCELRVKFSR | |
| | SADAPAYKQGQNQLYNELNLGRREEYDVLDKRRGRDPEMGGKPRRKNPQEGLYNELQKDKM | |
| | AEAYSEIGMKGERRRGKGHDGLYQGLSTATKDTYDALHMQALPPR | |
| C12A3.2 | QIQLVQSGPELKKPGETVKISCKASGYTFRHYSMNWVKQAPGKGLKWMGRINTESGVPIYA | 257 |
| VH | DDFKGRFAFSVETSASTAYLVINNLKDEDTASYFCSNDYLYSLDFWGQGTALTVSS | |
| C12A3.2 | DIVLTQSPPSLAMSLGKRATISCRASESVTILGSHLIYWYQQKPGQPPTLLIQLASNVQTG | 261 |
| VL | VPARFSGSGSRTDFTLTIDPVEEDDVAVYYCLQSRTIPRTFGGGTKLEIK | |
| C12A3.2 | QIQLVQSGPELKKPGETVKISCKASGYTFRHYSMNWVKQAPGKGLKWMGRINTESGVPIYA | 265 |
| scFv | DDFKGRFAFSVETSASTAYLVINNLKDEDTASYFCSNDYLYSLDFWGQGTALTVSSGGGGS | |
| domain | GGGGSGGGGSDIVLTQSPPSLAMSLGKRATISCRASESVTILGSHLIYWYQQKPGQPPTLL | |
| | IQLASNVQTGVPARFSGSGSRTDFTLTIDPVEEDDVAVYYCLQSRTIPRTFGGGTKLEIK | |
| C12A3.2 | QIQLVQSGPELKKPGETVKISCKASGYTFRHYSMNWVKQAPGKGLKWMGRINTESGVPIYA | 269 |
| Full | DDFKGRFAFSVETSASTAYLVINNLKDEDTASYFCSNDYLYSLDFWGQGTALTVSSGGGGS | |
| CART | GGGGSGGGGSDIVLTQSPPSLAMSLGKRATISCRASESVTILGSHLIYWYQQKPGQPPTLL | |
| | IQLASNVQTGVPARFSGSGSRTDFTLTIDPVEEDDVAVYYCLQSRTIPRTFGGGTKLEIKT | |
| | TTPAPRPPTPAPTIASQPLSLRPEACRPAAGGAVHTRGLDFACDIYIWAPLAGTCGVLLLS | |
| | LVITLYCKRGRKKLLYIFKQPFMRPVQTTQEEDGCSCRFPEEEEGGCELRVKFSRSADAPA | |
| | YKQGQNQLYNELNLGRREEYDVLDKRRGRDPEMGGKPRRKNPQEGLYNELQKDKMAEAYSE | |
| | IGMKGERRRGKGHDGLYQGLSTATKDTYDALHMQALPPR | |
| C13F12.1 | QIQLVQSGPELKKPGETVKISCKASGYTFTHYSMNWVKQAPGKGLKWMGRINTETGEPLYA | 258 |
| VH | DDFKGRFAFSLETSASTAYLVINNLKNEDTATFFCSNDYLYSCDYWGQGTTLTVSS | |
| C13F12.1 | DIVLTQSPPSLAMSLGKRATISCRASESVTILGSHLIYWYQQKPGQPPTLLIQLASNVQTG | 262 |
| VL | VPARFSGSGSRTDFTLTIDPVEEDDVAVYYCLQSRTIPRTFGGGTKLEIK | |
| C13F12.1 | QIQLVQSGPELKKPGETVKISCKASGYTFTHYSMNWVKQAPGKGLKWMGRINTETGEPLYA | 266 |
| scFv | DDFKGRFAFSLETSASTAYLVINNLKNEDTATFFCSNDYLYSCDYWGQGTTLTVSSGGGGS | |
| domain | GGGGSGGGGSDIVLTQSPPSLAMSLGKRATISCRASESVTILGSHLIYWYQQKPGQPPTLL | |
| | IQLASNVQTGVPARFSGSGSRTDFTLTIDPVEEDDVAVYYCLQSRTIPRTFGGGTKLEIK | |
| C13F12.1 | QIQLVQSGPELKKPGETVKISCKASGYTFTHYSMNWVKQAPGKGLKWMGRINTETGEPLYA | 270 |
| Full | DDFKGRFAFSLETSASTAYLVINNLKNEDTATFFCSNDYLYSCDYWGQGTTLTVSSGGGGS | |
| CART | GGGGSGGGGSDIVLTQSPPSLAMSLGKRATISCRASESVTILGSHLIYWYQQKPGQPPTLL | |
| | IQLASNVQTGVPARFSGSGSRTDFTLTIDPVEEDDVAVYYCLQSRTIPRTFGGGTKLEIKT | |
| | TTPAPRPPTPAPTIASQPLSLRPEACRPAAGGAVHTRGLDFACDIYIWAPLAGTCGVLLLS | |
| | LVITLYCKRGRKKLLYIFKQPFMRPVQTTQEEDGCSCRFPEEEEGGCELRVKFSRSADAPA | |
| | YKQGQNQLYNELNLGRREEYDVLDKRRGRDPEMGGKPRRKNPQEGLYNELQKDKMAEAYSE | |
| | IGMKGERRRGKGHDGLYQGLSTATKDTYDALHMQALPPR | |

[0355] In embodiments, the nucleic acid sequence of an exemplary humanized anti-BCMA scFv in which VH precedes the VL (H2L, e.g., pBCMA 2 and pBCMA 4) is as follows:

(SEQ ID NO: 272)
CAGGTGCAGCTGGTCCAGAGCGGCGCCGAAGTGAAGAAGCCCGGCAGCTC
CGTGAAAGTGAGCTGCAAGGCCAGCGGCGGCACCTTCAGCAACTACTGGA
TGCACTGGGTGAGGCAGGCCCCCGGACAGGGCCTGGAGTGGATGGGCGCC
ACCTACAGGGGCCACAGCGACACCTACTACAACCAGAAGTTCAAGGGCCG
GGTGACCATCACCGCCGACAAGAGCACCAGCACCGCCTACATGGAACTGA
GCAGCCTCAGGAGCGAGGACACCGCTGTGTATTACTGCGCCAGGGGCGCC
ATCTACAACGGCTACGACGTGCTGGACAACTGGGGCCAGGGCACACTAGT
GACCGTGTCCAGCGGTGGAGGAGGTAGCGGAGGAGGCGGGAGCGGTGGAG
GTGGCTCTGGAGGTGGCGGAAGCGACATCCAGATGACCCAGAGCCCTAGC
TCACTGAGCGCCAGCGTGGGCGACAGGGTGACCATTACCTGCTCCGCCAG
CCAGGACATCAGCAACTACCTGAACTGGTACCAGCAGAAGCCCGGCAAGG
CCCCCAAGCTGCTGATCTACTACACCTCCAACCTGCACTCCGGCGTGCCC
AGCAGGTTCAGCGGAAGCGGCAGCGGCACCGATTTCACCCTGACCATCTC
CAGCCTGCAGCCCGAGGACTTCGCCACCTACTACTGCCAGCAGTACAGGA
AGCTCCCCTGGACTTTCGGCCAGGGCACCAAACTGGAGATCAAGCGT

The corresponding amino acid sequence for the exemplary humanized anti-BCMA scFv in which Vh precedes the VL (H2L, e.g., pBCMA 2 and pBCMA 4) is as follows:

(SEQ ID NO: 271)
Q V Q L V Q S G A E V K K P G S S V K V S C K A S
G G T F S N Y W M H W V R Q A P G Q G L E W M G A
T Y R G H S D T Y Y N Q K F K G R V T I T A D K S
T S T A Y M E L S S L R S E D T A V Y Y C A R G A
I Y N G Y D V L D N W G Q G T L V T V S S G G G G
S G G G G S G G G G S G G G G S D I Q M T Q S P S
S L S A S V G D R V T I T C S A S Q D I S N Y L N
W Y Q Q K P G K A P K L L I Y Y T S N L H S G V P
S R F S G S G S G T D F T L T I S S L Q P E D F A
T Y Y C Q Q Y R K L P W T F G Q G T K L E I K R

In embodiments, the nucleic acid sequence of an exemplary humanized anti-BCMA scFv in which VL precedes the VH (L2H, e.g., pBCMA1 and pBCMA3) is as follows:

(SEQ ID NO: 274)
GACATCCAGATGACCCAGAGCCCTAGCTCACTGAGCGCCAGCGTGGGCGA
CAGGGTGACCATTACCTGCTCCGCCAGCCAGGACATCAGCAACTACCTGA
ACTGGTACCAGCAGAAGCCCGGCAAGGCCCCCAAGCTGCTGATCTACTAC
ACCTCCAACCTGCACTCCGGCGTGCCCAGCAGGTTCAGCGGAAGCGGCAG
CGGCACCGATTTCACCCTGACCATCTCCAGCCTGCAGCCCGAGGACTTCG
CCACCTACTACTGCCAGCAGTACAGGAAGCTCCCCTGGACTTTCGGCCAG
GGCACCAAACTGGAGATCAAGCGTGGTGGAGGAGGTAGCGGAGGAGGCGG
GAGCGGTGGAGGTGGCTCTGGAGGTGGCGGAAGCCAGGTGCAGCTGGTCC
AGAGCGGCGCCGAAGTGAAGAAGCCCGGCAGCTCCGTGAAAGTGAGCTGC
AAGGCCAGCGGCGGCACCTTCAGCAACTACTGGATGCACTGGGTGAGGCA
GGCCCCCGGACAGGGCCTGGAGTGGATGGGCGCCACCTACAGGGGCCACA
GCGACACCTACTACAACCAGAAGTTCAAGGGCCGGGTGACCATCACCGCC
GACAAGAGCACCAGCACCGCCTACATGGAACTGAGCAGCCTCAGGAGCGA
GGACACCGCTGTGTATTACTGCGCCAGGGGCGCCATCTACAACGGCTACG
ACGTGCTGGACAACTGGGGCCAGGGCACACTAGTGACCGTGTCCAGC

The corresponding amino acid sequence of the exemplary humanized anti-BCMA scFv in which VL precedes the VH (L2H, e.g., pBCMA1 and pBCMA3) is as follows:

(SEQ ID NO: 273)
DIQMTQSPSS LSASVGDRVT ITCSASQDIS NYLNWYQQKP
GKAPKLLIYY TSNLHSGVPSRFSGSGSGTD FTLTISSLQP
EDFATYYCQQ YRKLPWTFGQ GTKLEIKRGG GGSGGGGSGGGGSGGGG
SQV QLVQSGAEVK KPGSSVKVSC KASGGTFSNY WMHWVRQAPG
QGLEWMGATYRGHSDTYYNQ KFKGRVTITA DKSTSTAYMELSSLRSED
TA VYYCARGAIYNGYDVLDNWGQGTLVTVSS

[0356] The CAR scFv fragments can be cloned into lentiviral vectors to create a full length CAR construct in a single coding frame, and using the EF1 alpha promoter for expression (SEQ ID NO: 11).

[0357] The CAR construct can include a Gly/Ser linker having one or more of the following sequences: GGGGS (SEQ ID NO:25); encompassing 1-6 “Gly Gly Gly Gly Ser” repeating units, e.g., GGGGSGGGGS GGGGSGGGGS GGGGSGGGGS (SEQ ID NO:26); GGGGSGGGGS GGGGSGGGGS (SEQ ID NO:27); GGGGSGGGGS GGGGS (SEQ ID NO:28); GGGS (SEQ ID NO:29); or encompassing 1-10 “Gly Gly Gly Ser” repeating units, e.g., GGGSGGGSGG GSGGGSGGGS GGGSGGGSGG GSGGGSGGGS (SEQ ID NO:38). In embodiments, the CAR construct include a poly A sequence, e.g., a sequence encompassing 50-5000 or 100-5000 adenines (e.g., SEQ ID NO:30, SEQ ID NO:33, SEQ ID NO:34 or SEQ ID NO:35), or a sequence encompassing 50-5000 thymines (e.g., SEQ ID NO:31, SEQ ID NO:32). Alternatively, the CAR construct can include, for example, a linker including the sequence GSTSGSGKPGSGEGSTKG (SEQ ID NO: 1108)

### Bispecific CARs

[0358] In an embodiment a multispecific antibody molecule is a bispecific antibody molecule. A bispecific antibody has specificity for no more than two antigens. A bispecific antibody molecule is characterized by a first immunoglobulin variable domain sequence which has binding specificity for a first epitope and a second immunoglobulin variable domain sequence that has binding specificity for a second epitope. In an embodiment the first and second epitopes are on the same antigen, e.g., the same protein (or subunit of a multimeric protein). In an embodiment the first and second epitopes overlap. In an embodiment the first and second epitopes do not overlap. In an embodiment the first and second epitopes are on different antigens, e.g., different proteins (or different subunits of a multimeric protein). In an embodiment a bispecific antibody molecule comprises a heavy chain variable domain sequence and a light chain variable domain sequence which have binding specificity for a first epitope and a heavy chain variable domain sequence and a light chain variable domain sequence which have binding specificity for a second epitope. In an embodiment a bispecific antibody molecule comprises a half antibody having binding specificity for a first epitope and a half antibody having binding specificity for a second epitope. In an embodiment a bispecific antibody molecule comprises a half antibody, or fragment thereof, having binding specificity for a first epitope and a half antibody, or fragment thereof, having binding specificity for a second epitope. In an embodiment a bispecific antibody molecule comprises a scFv, or fragment thereof, have binding specificity for a first epitope and a scFv, or fragment thereof, have binding specificity for a second epitope.

[0359] In certain embodiments, the antibody molecule is a multi-specific (e.g., a bispecific or a trispecific) antibody molecule. Protocols for generating bispecific or heterodimeric antibody molecules are known in the art; including but not limited to, for example, the “knob in a hole” approach described in, e.g., U.S. Pat. No. 5,731,168; the electrostatic steering Fc pairing as described in, e.g., WO 09/089004, WO 06/106905 and WO 2010/129304; Strand Exchange Engineered Domains (SEED) heterodimer formation as described in, e.g., WO 07/110205; Fab arm exchange as described in, e.g., WO 08/119353, WO 2011/131746, and WO 2013/060867; double antibody conjugate, e.g., by antibody cross-linking to generate a bi-specific structure using a heterobifunctional reagent having an amine-reactive group and a sulfhydryl reactive group as described in, e.g., U.S. Pat. No. 4,433,059; bispecific antibody determinants generated by recombining half antibodies (heavy-light chain pairs or Fabs) from different antibodies through cycle of reduction and oxidation of disulfide bonds between the two heavy chains, as described in, e.g., U.S. Pat. No. 4,444,878; trifunctional antibodies, e.g., three Fab′ fragments cross-linked through sulfhdryl reactive groups, as described in, e.g., U.S. Pat. No. 5,273,743; biosynthetic binding proteins, e.g., pair of scFvs cross-linked through C-terminal tails preferably through disulfide or amine-reactive chemical cross-linking, as described in, e.g., U.S. Pat. No. 5,534,254; bifunctional antibodies, e.g., Fab fragments with different binding specificities dimerized through leucine zippers (e.g., c-fos and c-jun) that have replaced the constant domain, as described in, e.g., U.S. Pat. No. 5,582,996; bispecific and oligospecific mono- and oligovalent receptors, e.g., VH-CH1 regions of two antibodies (two Fab fragments) linked through a polypeptide spacer between the CH1 region of one antibody and the VH region of the other antibody typically with associated light chains, as described in, e.g., U.S. Pat. No. 5,591,828; bispecific DNA-antibody conjugates, e.g., crosslinking of antibodies or Fab fragments through a double stranded piece of DNA, as described in, e.g., U.S. Pat. No. 5,635,602; bispecific fusion proteins, e.g., an expression construct containing two scFvs with a hydrophilic helical peptide linker between them and a full constant region, as described in, e.g., U.S. Pat. No. 5,637,481; multivalent and multispecific binding proteins, e.g., dimer of polypeptides having first domain with binding region of Ig heavy chain variable region, and second domain with binding region of Ig light chain variable region, generally termed diabodies (higher order structures are also encompassed creating for bispecifc, trispecific, or tetraspecific molecules, as described in, e.g., U.S. Pat. No. 5,837,242; minibody constructs with linked VL and VH chains further connected with peptide spacers to an antibody hinge region and CH3 region, which can be dimerized to form bispecific/multivalent molecules, as described in, e.g., U.S. Pat. No. 5,837,821; VH and VL domains linked with a short peptide linker (e.g., 5 or 10 amino acids) or no linker at all in either orientation, which can form dimers to form bispecific diabodies; trimers and tetramers, as described in, e.g., U.S. Pat. No. 5,844,094; String of VH domains (or VL domains in family members) connected by peptide linkages with crosslinkable groups at the C-terminus further associated with VL domains to form a series of FVs (or scFvs), as described in, e.g., U.S. Pat. No. 5,864,019; and single chain binding polypeptides with both a VH and a VL domain linked through a peptide linker are combined into multivalent structures through non-covalent or chemical crosslinking to form, e.g., homobivalent, heterobivalent, trivalent, and tetravalent structures using both scFV or diabody type format, as described in, e.g., U.S. Pat. No. 5,869,620. Additional exemplary multispecific and bispecific molecules and methods of making the same are found, for example, in U.S. Pat. No. 5,910,573, U.S. Pat. No. 5,932,448, U.S. Pat. No. 5,959,083, U.S. Pat. No. 5,989,830, U.S. Pat. No. 6,005,079, U.S. Pat. No. 6,239,259, U.S. Pat. No. 6,294,353, U.S. Pat. No. 6,333,396, U.S. Pat. No. 6,476,198, U.S. Pat. No. 6,511,663, U.S. Pat. No. 6,670,453, U.S. Pat. No. 6,743,896, U.S. Pat. No. 6,809,185, U.S. Pat. No. 6,833,441, U.S. Pat. No. 7,129,330, U.S. Pat. No. 7,183,076, U.S. Pat. No. 7,521,056, U.S. Pat. No. 7,527,787, U.S. Pat. No. 7,534,866, U.S. Pat. No. 7,612,181, US2002004587A1, US2002076406A1, US2002103345A1, US2003207346A1, US2003211078A1, US2004219643A1, US2004220388A1, US2004242847A1, US2005003403A1, US2005004352A1, US2005069552A1, US2005079170A1, US2005100543A1, US2005136049A1, US2005136051A1, US2005163782A1, US2005266425A1, US2006083747A1, US2006120960A1, US2006204493A1, US2006263367A1, US2007004909A1, US2007087381A1, US2007128150A1, US2007141049A1, US2007154901A1, US2007274985A1, US2008050370A1, US2008069820A1, US2008152645A1, US2008171855A1, US2008241884A1, US2008254512A1, US2008260738A1, US2009130106A1, US2009148905A1, US2009155275A1, US2009162359A1, US2009162360A1, US2009175851A1, US2009175867A1, US2009232811A1, US2009234105A1, US2009263392A1, US2009274649A1, EP346087A2, WO0006605A2, WO02072635A2, WO04081051A1, WO06020258A2, WO2007044887A2, WO2007095338A2, WO2007137760A2, WO2008119353A1, WO2009021754A2, WO2009068630A1, WO9103493A1, WO9323537A1, WO9409131A1, WO9412625A2, WO9509917A1, WO9637621A2, WO9964460A1. The contents of the above-referenced applications are incorporated herein by reference in their entireties.

[0360] Within each antibody or antibody fragment (e.g., scFv) of a bispecific antibody molecule, the VH can be upstream or downstream of the VL. In some embodiments, the upstream antibody or antibody fragment (e.g., scFv) is arranged with its VH (VH₁) upstream of its VL (VL₁) and the downstream antibody or antibody fragment (e.g., scFv) is arranged with its VL (VL₂) upstream of its VH (VH₂), such that the overall bispecific antibody molecule has the arrangement VH₁-VL₁-VL₂-VH₂. In other embodiments, the upstream antibody or antibody fragment (e.g., scFv) is arranged with its VL (VL₁) upstream of its VH (VH₁) and the downstream antibody or antibody fragment (e.g., scFv) is arranged with its VH (VH₂) upstream of its VL (VL₂), such that the overall bispecific antibody molecule has the arrangement VL₁-VH₁—VH₂—VL₂. Optionally, a linker is disposed between the two antibodies or antibody fragments (e.g., scFvs), e.g., between VL₁ and VL₂ if the construct is arranged as VH₁-VL₁-VL₂-VH₂, or between VH₁ and VH₂ if the construct is arranged as VL₁-VH₁—VH₂—VL₂. The linker may be a linker as described herein, e.g., a (Gly₄-Ser)n linker, wherein n is 1, 2, 3, 4, 5, or 6, preferably 4 (SEQ ID NO: 26). In general, the linker between the two scFvs should be long enough to avoid mispairing between the domains of the two scFvs. Optionally, a linker is disposed between the VL and VH of the first scFv. Optionally, a linker is disposed between the VL and VH of the second scFv. In constructs that have multiple linkers, any two or more of the linkers can be the same or different. Accordingly, in some embodiments, a bispecific CAR comprises VLs, VHs, and optionally one or more linkers in an arrangement as described herein.

[0361] In one aspect, the bispecific antibody molecule is characterized by a first immunoglobulin variable domain sequence, e.g., a scFv, which has binding specificity for BCMA, e.g., comprises a scFv as described herein, e.g., as described in Table 1 or Table 16, or comprises the light chain CDRs and/or heavy chain CDRs from a BCMA scFv described herein, and a second immunoglobulin variable domain sequence that has binding specificity for a second epitope on a different antigen. In some aspects the second immunoglobulin variable domain sequence has binding specificity for an antigen expressed on AML cells, e.g., an antigen other than BCMA. For example, the second immunoglobulin variable domain sequence has binding specificity for CD123. As another example, the second immunoglobulin variable domain sequence has binding specificity for CLL-1. As another example, the second immunoglobulin variable domain sequence has binding specificity for CD34. As another example, the second immunoglobulin variable domain sequence has binding specificity for FLT3. For example, the second immunoglobulin variable domain sequence has binding specificity for folate receptor beta. In some aspects, the second immunoglobulin variable domain sequence has binding specificity for an antigen expressed on B-cells, for example, CD10, CD19, CD20, CD22, CD34, CD123, FLT-3, ROR1, CD79b, CD179b, or CD79a.

### Chimeric TCR

[0362] In one aspect, the anti-BCMA antibodies and antibody fragments of the present invention (for example, those disclosed in Tables 1 and 16) can be grafted to one or more constant domain of a T cell receptor (“TCR”) chain, for example, a TCR alpha or TCR beta chain, to create an chimeric TCR that binds specificity to BCMA. Without being bound by theory, it is believed that chimeric TCRs will signal through the TCR complex upon antigen binding. For example, a BCMA scFv as disclosed herein, can be grafted to the constant domain, e.g., at least a portion of the extracellular constant domain, the transmembrane domain and the cytoplasmic domain, of a TCR chain, for example, the TCR alpha chain and/or the TCR beta chain. As another example, a BCMA antibody fragment, for example a VL domain as described herein, can be grafted to the constant domain of a TCR alpha chain, and a BCMA antibody fragment, for example a VH domain as described herein, can be grafted to the constant domain of a TCR beta chain (or alternatively, a VL domain may be grafted to the constant domain of the TCR beta chain and a VH domain may be grafted to a TCR alpha chain). As another example, the CDRs of an anti-BCMA antibody or antibody fragment, e.g., the CDRs of an anti-BCMA antibody or antibody fragment as described in Tables 20, 21, 22, 23, 24, or 25 may be grafted into a TCR alpha and/or beta chain to create a chimeric TCR that binds specifically to BCMA. For example, the LCDRs disclosed herein may be grafted into the variable domain of a TCR alpha chain and the HCDRs disclosed herein may be grafted to the variable domain of a TCR beta chain, or vice versa. Such chimeric TCRs may be produced by methods known in the art (For example, Willemsen R A et al, Gene Therapy 2000; 7: 1369-1377; Zhang T et al, Cancer Gene Ther 2004; 11: 487-496; Aggen et al, Gene Ther. 2012 April; 19(4):365-74).

### Transmembrane Domain

[0363] With respect to the transmembrane domain, in various embodiments, a CAR can be designed to comprise a transmembrane domain that is attached to the extracellular domain of the CAR. A transmembrane domain can include one or more additional amino acids adjacent to the transmembrane region, e.g., one or more amino acid associated with the extracellular region of the protein from which the transmembrane was derived (e.g., 1, 2, 3, 4, 5, 6, 7, 8, 9, 10 up to 15 amino acids of the extracellular region) and/or one or more additional amino acids associated with the intracellular region of the protein from which the transmembrane protein is derived (e.g., 1, 2, 3, 4, 5, 6, 7, 8, 9, 10 up to 15 amino acids of the intracellular region). In one aspect, the transmembrane domain is one that is associated with one of the otherdomains of the CAR is used. In some instances, the transmembrane domain can be selected or modified by amino acid substitution to avoid binding of such domains to the transmembrane domains of the same or different surface membrane proteins, e.g., to minimize interactions with other members of the receptor complex. In one aspect, the transmembrane domain is capable of homodimerization with another CAR on the CAR-expressing cell, e.g., CART cell, surface. In a different aspect the amino acid sequence of the transmembrane domain may be modified or substituted so as to minimize interactions with the binding domains of the native binding partner present in the same CAR-expressing cell, e.g., CART.

[0364] The transmembrane domain may be derived either from a natural or from a recombinant source. Where the source is natural, the domain may be derived from any membrane-bound or transmembrane protein. In one aspect the transmembrane domain is capable of signaling to the intracellular domain(s) whenever the CAR has bound to a target. A transmembrane domain of particular use in this invention may include at least the transmembrane region(s) of e.g., the alpha, beta or zeta chain of the T-cell receptor, CD28, CD3 epsilon, CD45, CD4, CDS, CD8 (e.g., CD8 alpha, CD8 beta), CD9, CD16, CD22, CD33, CD37, CD64, CD80, CD86, CD134, CD137, CD154. In some embodiments, a transmembrane domain may include at least the transmembrane region(s) of a costimulatory molecule, e.g., MHC class I molecule, TNF receptor proteins, Immunoglobulin-like proteins, cytokine receptors, integrins, signaling lymphocytic activation molecules (SLAM proteins), activating NK cell receptors, BTLA, a Toll ligand receptor, OX40, CD2, CD7, CD27, CD28, CD30, CD40, CDS, ICAM-1, LFA-1 (CD11a/CD18), 4-1BB (CD137), B7-H3, CDS, ICAM-1, ICOS (CD278), GITR, BAFFR, LIGHT, HVEM (LIGHTR), KIRDS2, SLAMF7, NKp80 (KLRF1), NKp44, NKp30, NKp46, CD19, CD4, CD8alpha, CD8beta, IL2R beta, IL2R gamma, IL7R alpha, ITGA4, VLA1, CD49a, ITGA4, IA4, CD49D, ITGA6, VLA-6, CD49f, ITGAD, CD11d, ITGAE, CD103, ITGAL, CD11a, LFA-1, ITGAM, CD11b, ITGAX, CD11c, ITGB1, CD29, ITGB2, CD18, LFA-1, ITGB7, NKG2D, NKG2C, TNFR2, TRANCE/RANKL, DNAM1 (CD226), SLAMF4 (CD244, 2B4), CD84, CD96 (Tactile), CEACAM1, CRTAM, Ly9 (CD229), CD160 (BY55), PSGL1, CD100 (SEMA4D), CD69, SLAMF6 (NTB-A, Ly108), SLAM (SLAMF1, CD150, IPO-3), BLAME (SLAMF8), SELPLG (CD162), LTBR, LAT, GADS, SLP-76, PAG/Cbp, CD19a, and a ligand that specifically binds with CD83.

[0365] In some instances, the transmembrane domain can be attached to the extracellular region of the CAR, e.g., the antigen binding domain of the CAR, via a hinge, e.g., a hinge from a human protein. For example, in one embodiment, the hinge can be a human Ig (immunoglobulin) hinge, e.g., an IgG4 hinge, or a CD8a hinge. In one embodiment, the hinge or spacer comprises (e.g., consists of) the amino acid sequence of SEQ ID NO:2. In one aspect, the transmembrane domain comprises (e.g., consists of) a transmembrane domain of SEQ ID NO: 6.

[0366] In one aspect, the hinge or spacer comprises an IgG4 hinge. For example, in one embodiment, the hinge or spacer comprises a hinge of the amino acid sequence ESKYGPPCPPCPAPEFLGGPSVFLFPPKPKDTLMISRTPEVTCVVVDVSQEDPEVQFNW YVDGVEVHNAKTKPREEQFNSTYRVVSVLTVLHQDWLNGKEYKCKVSNKGLPSSIEK TISKAKGQPREPQVYTLPPSQEEMTKNQVSLTCLVKGFYPSDIAVEWESNGQPENNYK TTPPVLDSDGSFFLYSRLTVDKSRWQEGNVFSCSVMHEALHNHYTQKSLSLSLGKM (SEQ ID NO:3). In some embodiments, the hinge or spacer comprises a hinge encoded by a nucleotide sequence of GAGAGCAAGTACGGCCCTCCCTGCCCCCCTTGCCCTGCCCCCGAGTTCCTGGGCGG ACCCAGCGTGTTCCTGTTCCCCCCCAAGCCCAAGGACACCCTGATGATCAGCCGGA CCCCCGAGGTGACCTGTGTGGTGGTGGACGTGTCCCAGGAGGACCCCGAGGTCCA GTTCAACTGGTACGTGGACGGCGTGGAGGTGCACAACGCCAAGACCAAGCCCCGG GAGGAGCAGTTCAATAGCACCTACCGGGTGGTGTCCGTGCTGACCGTGCTGCACCA GGACTGGCTGAACGGCAAGGAATACAAGTGTAAGGTGTCCAACAAGGGCCTGCCC AGCAGCATCGAGAAAACCATCAGCAAGGCCAAGGGCCAGCCTCGGGAGCCCCAGG TGTACACCCTGCCCCCTAGCCAAGAGGAGATGACCAAGAACCAGGTGTCCCTGAC CTGCCTGGTGAAGGGCTTCTACCCCAGCGACATCGCCGTGGAGTGGGAGAGCAAC GGCCAGCCCGAGAACAACTACAAGACCACCCCCCCTGTGCTGGACAGCGACGGCA GCTTCTTCCTGTACAGCCGGCTGACCGTGGACAAGAGCCGGTGGCAGGAGGGCAA CGTCTTTAGCTGCTCCGTGATGCACGAGGCCCTGCACAACCACTACACCCAGAAGA GCCTGAGCCTGTCCCTGGGCAAGATG (SEQ ID NO:14).

[0367] In one aspect, the hinge or spacer comprises an IgD hinge. For example, in one embodiment, the hinge or spacer comprises a hinge of the amino acid sequence RWPESPKAQASSVPTAQPQAEGSLAKATTAPATTRNTGRGGEEKKKEKEKEEQEERET KTPECPSHTQPLGVYLLTPAVQDLWLRDKATFTCFVVGSDLKDAHLTWEVAGKVPTG GVEEGLLERHSNGSQSQHSRLTLPRSLWNAGTSVTCTLNHPSLPPQRLMALREPAAQA PVKLSLNLLASSDPPEAASWLLCEVSGFSPPNILLMWLEDQREVNTSGFAPARPPPQPG STTFWAWSVLRVPAPPSPQPATYTCVVSHEDSRTLLNASRSLEVSYVTDH (SEQ ID NO:4). In some embodiments, the hinge or spacer comprises a hinge encoded by a nucleotide sequence of AGGTGGCCCGAAAGTCCCAAGGCCCAGGCATCTAGTGTTCCTACTGCACAGCCCCA GGCAGAAGGCAGCCTAGCCAAAGCTACTACTGCACCTGCCACTACGCGCAATACT GGCCGTGGCGGGGAGGAGAAGAAAAAGGAGAAAGAGAAAGAAGAACAGGAAGA GAGGGAGACCAAGACCCCTGAATGTCCATCCCATACCCAGCCGCTGGGCGTCTATC TCTTGACTCCCGCAGTACAGGACTTGTGGCTTAGAGATAAGGCCACCTTTACATGT TTCGTCGTGGGCTCTGACCTGAAGGATGCCCATTTGACTTGGGAGGTTGCCGGAAA GGTACCCACAGGGGGGGTTGAGGAAGGGTTGCTGGAGCGCCATTCCAATGGCTCT CAGAGCCAGCACTCAAGACTCACCCTTCCGAGATCCCTGTGGAACGCCGGGACCTC TGTCACATGTACTCTAAATCATCCTAGCCTGCCCCCACAGCGTCTGATGGCCCTTAG AGAGCCAGCCGCCCAGGCACCAGTTAAGCTTAGCCTGAATCTGCTCGCCAGTAGTG ATCCCCCAGAGGCCGCCAGCTGGCTCTTATGCGAAGTGTCCGGCTTTAGCCCGCCC AACATCTTGCTCATGTGGCTGGAGGACCAGCGAGAAGTGAACACCAGCGGCTTCG CTCCAGCCCGGCCCCCACCCCAGCCGGGTTCTACCACATTCTGGGCCTGGAGTGTC TTAAGGGTCCCAGCACCACCTAGCCCCCAGCCAGCCACATACACCTGTGTTGTGTC CCATGAAGATAGCAGGACCCTGCTAAATGCTTCTAGGAGTCTGGAGGTTTCCTACG TGACTGACCATT (SEQ ID NO:15).

[0368] In one aspect, the transmembrane domain may be recombinant, in which case it will comprise predominantly hydrophobic residues such as leucine and valine. In one aspect a triplet of phenylalanine, tryptophan and valine can be found at each end of a recombinant transmembrane domain.

[0369] Optionally, a short oligo- or polypeptide linker, between 2 and 10 amino acids in length may form the linkage between the transmembrane domain and the cytoplasmic region of the CAR. A glycine-serine doublet provides a particularly suitable linker. For example, in one aspect, the linker comprises the amino acid sequence of GGGGSGGGGS (SEQ ID NO:5). In some embodiments, the linker is encoded by a nucleotide sequence of GGTGGCGGAGGTTCTGGAGGTGGAGGTTCC (SEQ ID NO:16).

[0370] In one aspect, the hinge or spacer comprises a KIR2DS2 hinge.

### Cytoplasmic Domain

[0371] The cytoplasmic domain or region of a CAR of the present invention includes an intracellular signaling domain. An intracellular signaling domain is generally responsible for activation of at least one of the normal effector functions of the immune cell in which the CAR has been introduced.

[0372] Examples of intracellular signaling domains for use in the CAR of the invention include the cytoplasmic sequences of the T cell receptor (TCR) and co-receptors that act in concert to initiate signal transduction following antigen receptor engagement, as well as any derivative or variant of these sequences and any recombinant sequence that has the same functional capability.

[0373] It is known that signals generated through the TCR alone are insufficient for full activation of the T cell and that a secondary and/or costimulatory signal is also required. Thus, T cell activation can be said to be mediated by two distinct classes of cytoplasmic signaling sequences: those that initiate antigen-dependent primary activation through the TCR (primary intracellular signaling domains) and those that act in an antigen-independent manner to provide a secondary or costimulatory signal (secondary cytoplasmic domain, e.g., a costimulatory domain).

[0374] A primary signaling domain regulates primary activation of the TCR complex either in a stimulatory way, or in an inhibitory way. Primary intracellular signaling domains that act in a stimulatory manner may contain signaling motifs which are known as immunoreceptor tyrosine-based activation motifs or ITAMs.

[0375] Examples of ITAM containing primary intracellular signaling domains that are of particular use in the invention include those of TCR zeta, FcR gamma, FcR beta, CD3 gamma, CD3 delta, CD3 epsilon, CD5, CD22, CD79a, CD79b, CD278 (also known as “ICOS”), FcεRI, DAP10, DAP12, and CD66d. In one embodiment, a CAR of the invention comprises an intracellular signaling domain, e.g., a primary signaling domain of CD3-zeta.

[0376] In one embodiment, a primary signaling domain comprises a modified ITAM domain, e.g., a mutated ITAM domain which has altered (e.g., increased or decreased) activity as compared to the native ITAM domain. In one embodiment, a primary signaling domain comprises a modified ITAM-containing primary intracellular signaling domain, e.g., an optimized and/or truncated ITAM-containing primary intracellular signaling domain. In an embodiment, a primary signaling domain comprises one, two, three, four or more ITAM motifs.

[0377] Further examples of molecules containing a primary intracellular signaling domain that are of particular use in the invention include those of DAP10, DAP12, and CD32.

[0378] The intracellular signalling domain of the CAR can comprise the primary signalling domain, e.g., CD3-zeta signaling domain, by itself or it can be combined with any other desired intracellular signaling domain(s) useful in the context of a CAR of the invention. For example, the intracellular signaling domain of the CAR can comprise a primary signalling domain, e.g., CD3 zeta chain portion, and a costimulatory signaling domain. The costimulatory signaling domain refers to a portion of the CAR comprising the intracellular domain of a costimulatory molecule. A costimulatory molecule is a cell surface molecule other than an antigen receptor or its ligands that is required for an efficient response of lymphocytes to an antigen. Examples of such molecules include MHC class I molecule, TNF receptor proteins, Immunoglobulin-like proteins, cytokine receptors, integrins, signaling lymphocytic activation molecules (SLAM proteins), activating NK cell receptors, BTLA, a Toll ligand receptor, OX40, CD2, CD7, CD27, CD28, CD30, CD40, CDS, ICAM-1, LFA-1 (CD11a/CD18), 4-1BB (CD137), B7-H3, CDS, ICAM-1, ICOS (CD278), GITR, BAFFR, LIGHT, HVEM (LIGHTR), KIRDS2, SLAMF7, NKp80 (KLRF1), NKp44, NKp30, NKp46, CD19, CD4, CD8alpha, CD8beta, IL2R beta, IL2R gamma, IL7R alpha, ITGA4, VLA1, CD49a, ITGA4, IA4, CD49D, ITGA6, VLA-6, CD49f, ITGAD, CD11d, ITGAE, CD103, ITGAL, CD11a, LFA-1, ITGAM, CD11b, ITGAX, CD11c, ITGB1, CD29, ITGB2, CD18, LFA-1, ITGB7, NKG2D, NKG2C, TNFR2, TRANCE/RANKL, DNAM1 (CD226), SLAMF4 (CD244, 2B4), CD84, CD96 (Tactile), CEACAM1, CRTAM, Ly9 (CD229), CD160 (BY55), PSGL1, CD100 (SEMA4D), CD69, SLAMF6 (NTB-A, Ly108), SLAM (SLAMF1, CD150, IPO-3), BLAME (SLAMF8), SELPLG (CD162), LTBR, LAT, GADS, SLP-76, PAG/Cbp, CD19a, and a ligand that specifically binds with CD83, and the like. For example, CD27 costimulation has been demonstrated to enhance expansion, effector function, and survival of human CART cells in vitro and augments human T cell persistence and antitumor activity in vivo (Song et al. Blood. 2012; 119(3):696-706). The intracellular signaling sequences within the cytoplasmic portion of the CAR of the invention may be linked to each other in a random or specified order. Optionally, a short oligo- or polypeptide linker, for example, between 2 and 10 amino acids (e.g., 2, 3, 4, 5, 6, 7, 8, 9, or 10 amino acids) in length may form the linkage between intracellular signaling sequence. In one embodiment, a glycine-serine doublet can be used as a suitable linker. In one embodiment, a single amino acid, e.g., an alanine, a glycine, can be used as a suitable linker.

[0379] In one aspect, the intracellular signaling domain is designed to comprise two or more, e.g., 2, 3, 4, 5, or more, costimulatory signaling domains. In an embodiment, the two or more, e.g., 2, 3, 4, 5, or more, costimulatory signaling domains, are separated by a linker molecule, e.g., a linker molecule described herein. In one embodiment, the intracellular signaling domain comprises two costimulatory signaling domains. In some embodiments, the linker molecule is a glycine residue. In some embodiments, the linker is an alanine residue.

[0380] In one aspect, the intracellular signaling domain is designed to comprise the signaling domain of CD3-zeta and the signaling domain of CD28. In one aspect, the intracellular signaling domain is designed to comprise the signaling domain of CD3-zeta and the signaling domain of 4-1BB. In one aspect, the signaling domain of 4-1BB is a signaling domain of SEQ ID NO: 7. In one aspect, the signaling domain of CD3-zeta is a signaling domain of SEQ ID NO: 9 (mutant CD3zeta) or SEQ ID NO: 10 (wild type human CD3zeta).

[0381] In one aspect, the intracellular signaling domain is designed to comprise the signaling domain of CD3-zeta and the signaling domain of CD27. In one aspect, the signaling domain of CD27 comprises an amino acid sequence of QRRKYRSNKGESPVEPAEPCRYSCPREEEGSTIPIQEDYRKPEPACSP (SEQ ID NO:8). In one aspect, the signalling domain of CD27 is encoded by a nucleic acid sequence of AGGAGTAAGAGGAGCAGGCTCCTGCACAGTGACTACATGAACATGACTCCCCGCC GCCCCGGGCCCACCCGCAAGCATTACCAGCCCTATGCCCCACCACGCGACTTCGCA GCCTATCGCTCC (SEQ ID NO:19).

[0382] In one aspect, the intracellular is designed to comprise the signaling domain of CD3-zeta and the signaling domain of CD28. In one aspect, the signaling domain of CD28 comprises an amino acid sequence of SEQ ID NO: 1104. In one aspect, the signaling domain of CD28 is encoded by a nucleic acid sequence of SEQ ID NO: 1105.

[0383] In one aspect, the intracellular is designed to comprise the signaling domain of CD3-zeta and the signaling domain of ICOS. In one aspect, the signaling domain of ICOS comprises an amino acid sequence of SEQ ID NO: 1106. In one aspect, the signaling domain of ICOS is encoded by a nucleic acid sequence of SEQ ID NO: 1107.

[0384] In one aspect, the CAR-expressing cell described herein can further comprise a second CAR, e.g., a second CAR that includes a different antigen binding domain, e.g., to the same target (BCMA) or a different target (e.g., CD19, CD20, or CS-1, or other multiple myeloma targets, e.g., kappa light chain, CD138, Lewis Y antigen, or CD38 (Garfall et al., Discovery Medicine, 2014, 17(91):37-46)). In one embodiment, the CAR-expressing cell comprises a first CAR that targets a first antigen and includes an intracellular signaling domain having a costimulatory signaling domain but not a primary signaling domain, and a second CAR that targets a second, different, antigen and includes an intracellular signaling domain having a primary signaling domain but not a costimulatory signaling domain. While not wishing to be bound by theory, placement of a costimulatory signaling domain, e.g., 4-1BB, CD28, CD27 ICOS, or OX-40, onto the first CAR, and the primary signaling domain, e.g., CD3 zeta, on the second CAR can limit the CAR activity to cells where both targets are expressed. In one embodiment, the CAR expressing cell comprises a first BCMA CAR that includes a BCMA binding domain, a transmembrane domain and a costimulatory domain and a second CAR that targets an antigen other than BCMA (e.g., an antigen expressed on leukemia or lymphoma cells, e.g., CD19, CD20, CS-1, kappa light chain, CD139, Lewis Y antigen, or CD38) and includes an antigen binding domain, a transmembrane domain and a primary signaling domain. In another embodiment, the CAR expressing cell comprises a first BCMA CAR that includes a BCMA binding domain, a transmembrane domain and a primary signaling domain and a second CAR that targets an antigen other than BCMA (e.g., an antigen expressed on leukemia or lymphoma cells, e.g., CD19, CD20, CS-1, kappa light chain, CD139, Lewis Y antigen, or CD38) and includes an antigen binding domain to the antigen, a transmembrane domain and a costimulatory signaling domain. In one embodiment, the CAR-expressing cell comprises a BCMA CAR described herein and a CAR that targets CD19 (CD19 CAR).

[0385] In one embodiment, the CAR-expressing cell comprises a BCMA CAR described herein and an inhibitory CAR. In one embodiment, the inhibitory CAR comprises an antigen binding domain that binds an antigen found on normal cells but not cancer cells, e.g., normal cells that also express mesothelin. In one embodiment, the inhibitory CAR comprises the antigen binding domain, a transmembrane domain and an intracellular domain of an inhibitory molecule. For example, the intracellular domain of the inhibitory CAR can be an intracellular domain of PD1, PD-L1, PD-L2, CTLA4, TIM3, CEACAM (e.g., CEACAM-1, CEACAM-3 and/or CEACAM-5), LAG3, VISTA, BTLA, TIGIT, LAIR1, CD160, 2B4, CD80, CD86, B7-H3 (CD276), B7-H4 (VTCN1), HVEM (TNFRSF14 or CD270), KIR, A2aR, MHC class I, MHC class II, GAL9, adenosine, and TGFR beta.

[0386] In one embodiment, when the CAR-expressing cell comprises two or more different CARs, the antigen binding domains of the different CARs can be such that the antigen binding domains do not interact with one another. For example, a cell expressing a first and second CAR can have an antigen binding domain of the first CAR, e.g., as a fragment, e.g., an scFv, that does not form an association with the antigen binding domain of the second CAR, e.g., the antigen binding domain of the second CAR is a VHH.

[0387] In some embodiments, the antigen binding domain comprises a single domain antigen binding (SDAB) molecules include molecules whose complementary determining regions are part of a single domain polypeptide. Examples include, but are not limited to, heavy chain variable domains, binding molecules naturally devoid of light chains, single domains derived from conventional 4-chain antibodies, engineered domains and single domain scaffolds other than those derived from antibodies. SDAB molecules may be any of the art, or any future single domain molecules. SDAB molecules may be derived from any species including, but not limited to mouse, human, camel, llama, lamprey, fish, shark, goat, rabbit, and bovine. This term also includes naturally occurring single domain antibody molecules from species other than Camelidae and sharks.

[0388] In one aspect, an SDAB molecule can be derived from a variable region of the immunoglobulin found in fish, such as, for example, that which is derived from the immunoglobulin isotype known as Novel Antigen Receptor (NAR) found in the serum of shark. Methods of producing single domain molecules derived from a variable region of NAR (“IgNARs”) are described in WO 03/014161 and Streltsov (2005) Protein Sci. 14:2901-2909.

[0389] According to another aspect, an SDAB molecule is a naturally occurring single domain antigen binding molecule known as heavy chain devoid of light chains. Such single domain molecules are disclosed in WO 9404678 and Hamers-Casterman, C. et al. (1993) Nature 363:446-448, for example. For clarity reasons, this variable domain derived from a heavy chain molecule naturally devoid of light chain is known herein as a VHH or nanobody to distinguish it from the conventional VH of four chain immunoglobulins. Such a VHH molecule can be derived from Camelidae species, for example in camel, llama, dromedary, alpaca and guanaco. Other species besides Camelidae may produce heavy chain molecules naturally devoid of light chain; such VHHs are within the scope of the invention.

[0390] The SDAB molecules can be recombinant, CDR-grafted, humanized, camelized, de-immunized and/or in vitro generated (e.g., selected by phage display).

[0391] It has also been discovered, that cells having a plurality of chimeric membrane embedded receptors comprising an antigen binding domain that interactions between the antigen binding domain of the receptors can be undesirable, e.g., because it inhibits the ability of one or more of the antigen binding domains to bind its cognate antigen. Accordingly, disclosed herein are cells having a first and a second non-naturally occurring chimeric membrane embedded receptor comprising antigen binding domains that minimize such interactions. Also disclosed herein are nucleic acids encoding a first and a second non-naturally occurring chimeric membrane embedded receptor comprising a antigen binding domains that minimize such interactions, as well as methods of making and using such cells and nucleic acids. In an embodiment the antigen binding domain of one of said first said second non-naturally occurring chimeric membrane embedded receptor, comprises an scFv, and the other comprises a single VH domain, e.g., a camelid, shark, or lamprey single VH domain, or a single VH domain derived from a human or mouse sequence.

[0392] In some embodiments, the claimed invention comprises a first and second CAR, wherein the antigen binding domain of one of said first CAR said second CAR does not comprise a variable light domain and a variable heavy domain. In some embodiments, the antigen binding domain of one of said first CAR said second CAR is an scFv, and the other is not an scFv. In some embodiments, the antigen binding domain of one of said first CAR said second CAR comprises a single VH domain, e.g., a camelid, shark, or lamprey single VH domain, or a single VH domain derived from a human or mouse sequence. In some embodiments, the antigen binding domain of one of said first CAR said second CAR comprises a nanobody. In some embodiments, the antigen binding domain of one of said first CAR said second CAR comprises a camelid VHH domain.

[0393] In some embodiments, the antigen binding domain of one of said first CAR said second CAR comprises an scFv, and the other comprises a single VH domain, e.g., a camelid, shark, or lamprey single VH domain, or a single VH domain derived from a human or mouse sequence. In some embodiments, the antigen binding domain of one of said first CAR said second CAR comprises an scFv, and the other comprises a nanobody. In some embodiments, the antigen binding domain of one of said first CAR said second CAR comprises comprises an scFv, and the other comprises a camelid VHH domain.

[0394] In some embodiments, when present on the surface of a cell, binding of the antigen binding domain of said first CAR to its cognate antigen is not substantially reduced by the presence of said second CAR. In some embodiments, binding of the antigen binding domain of said first CAR to its cognate antigen in the presence of said second CAR is 85%, 90%, 95%, 96%, 97%, 98% or 99% of binding of the antigen binding domain of said first CAR to its cognate antigen in the absence of said second CAR.

[0395] In some embodiments, when present on the surface of a cell, the antigen binding domains of said first CAR said second CAR, associate with one another less than if both were scFv antigen binding domains. In some embodiments, the antigen binding domains of said first CAR said second CAR, associate with one another 85%, 90%, 95%, 96%, 97%, 98% or 99% less than if both were scFv antigen binding domains.

[0396] In another aspect, the CAR-expressing cell described herein can further express another agent, e.g., an agent which enhances the activity of a CAR-expressing cell. For example, in one embodiment, the agent can be an agent which inhibits an inhibitory molecule, e.g., an agent described herein. Inhibitory molecules, e.g., PD1, can, in some embodiments, decrease the ability of a CAR-expressing cell to mount an immune effector response. Examples of inhibitory molecules include PD1, PD-L1, PD-L2, CTLA4, TIM3, CEACAM (e.g., CEACAM-1, CEACAM-3 and/or CEACAM-5), LAG3, VISTA, BTLA, TIGIT, LAIR1, CD160, 2B4, CD80, CD86, B7-H3 (CD276), B7-H4 (VTCN1), HVEM (TNFRSF14 or CD270), KIR, A2aR, MHC class I, MHC class II, GAL9, adenosine, and TGFR beta. In one embodiment, the agent which inhibits an inhibitory molecule comprises a first polypeptide, e.g., an inhibitory molecule, associated with a second polypeptide that provides a positive signal to the cell, e.g., an intracellular signaling domain described herein. In one embodiment, the agent comprises a first polypeptide, e.g., of an inhibitory molecule such as PD1, PD-L1, PD-L2, CTLA4, TIM3, CEACAM (e.g., CEACAM-1, CEACAM-3 and/or CEACAM-5), LAG3, VISTA, BTLA, TIGIT, LAIR1, CD160, 2B4, CD80, CD86, B7-H3 (CD276), B7-H4 (VTCN1), HVEM (TNFRSF14 or CD270), KIR, A2aR, MHC class I, MHC class II, GAL9, adenosine, and TGFR beta, or a fragment of any of these (e.g., at least a portion of an extracellular domain of any of these), and a second polypeptide which is an intracellular signaling domain described herein (e.g., comprising a costimulatory domain (e.g., 41BB, CD27 ICOS, or CD28, e.g., as described herein) and/or a primary signaling domain (e.g., a CD3 zeta signaling domain described herein). In one embodiment, the agent comprises a first polypeptide of PD1 or a fragment thereof (e.g., at least a portion of an extracellular domain of PD1), and a second polypeptide of an intracellular signaling domain described herein (e.g., a CD28 signaling domain described herein and/or a CD3 zeta signaling domain described herein). In embodiments, the CAR-expressing cell described herein comprises a switch costimulatory receptor, e.g., as described in WO 2013/019615, which is incorporated herein by reference in its entirety. PD1 is an inhibitory member of the CD28 family of receptors that also includes CD28, CTLA-4, ICOS, and BTLA. PD-1 is expressed on activated B cells, T cells and myeloid cells (Agata et al. 1996 Int. Immunol 8:765-75). Two ligands for PD1, PD-L1 and PD-L2 have been shown to downregulate T cell activation upon binding to PD1 (Freeman et a. 2000 J Exp Med 192:1027-34; Latchman et al. 2001 Nat Immunol 2:261-8; Carter et al. 2002 Eur J Immunol 32:634-43). PD-L1 is abundant in human cancers (Dong et al. 2003 J Mol Med 81:281-7; Blank et al. 2005 Cancer Immunol. Immunother 54:307-314; Konishi et al. 2004 Clin Cancer Res 10:5094). Immune suppression can be reversed by inhibiting the local interaction of PD1 with PD-L1.

[0397] In one embodiment, the agent comprises the extracellular domain (ECD) of an inhibitory molecule, e.g., Programmed Death 1 (PD1), can be fused to a transmembrane domain and intracellular signaling domains such as 41BB and CD3 zeta (also referred to herein as a PD1 CAR). In one embodiment, the PD1 CAR, when used incombinations with a BCMA CAR described herein, improves the persistence of the CAR-expressing cell, e.g., T cell or NK cell. In one embodiment, the CAR is a PD1 CAR comprising the extracellular domain of PD1 indicated as underlined in SEQ ID NO: 24. In one embodiment, the PD1 CAR comprises the amino acid sequence of SEQ ID NO:24.

(SEQ ID NO: 24)
Malpvtalllplalllhaarppgwfldspdrpwnpptfspallvvtegdn
atftcsfsntsesfvlnwyrmspsnqtdklaafpedrsqpgqdcrfrvtq
lpngrdfhmsvvrarrndsgtylcgaislapkaqikeslraelrvterra
evptahpspsprpagqfqtlvtttpaprpptpaptiasqplslrpeacrp
aaggavhtrgldfacdiyiwaplagtcgvlllslvitlyckrgrkkllyi
fkqpfmrpvqttqeedgcscrfpeeeeggcelrvkfsrsadapaykqgqn
qlynelnlgrreeydvldkrrgrdpemggkprrknpqeglynelqkdkma
eayseigmkgerrrgkghdglyqglstatkdtydalhmqalppr.

[0398] In one embodiment, the PD1 CAR comprises the amino acid sequence provided below (SEQ ID NO:22).

(SEQ ID NO: 22)
pgwfldspdrpwnpptfspallvvtegdnatftcsfsntsesfvlnwyrm
spsnqtdklaafpedrsqpgqdcrfrvtqlpngrdfhmsvvrarrndsgt
ylcgaislapkaqikeslraelryterraevptahpspsprpagqfqtlv
tttpaprpptpaptiasqplslrpeacrpaaggavhtrgldfacdiyiwa
plagtcgvlllslvitlyckrgrkkllyifkqpfmrpvqttqeedgcscr
fpeeeeggcelrvkfsrsadapaykqgqnqlynelnlgrreeydvldkrr
grdpemggkprrknpqeglynelqkdkmaeayseigmkgerrrgkghdgl
yqglstatkdtydalhmqalppr.

[0399] In one embodiment, the agent comprises a nucleic acid sequence encoding the PD1 CAR, e.g., the PD1 CAR described herein. In one embodiment, the nucleic acid sequence for the PD1 CAR is shown below, with the PD1 ECD underlined below in SEQ ID NO: 23

(SEQ ID NO: 23)
atggccctccctgtcactgccctgcttctccccctcgcactcctgctcca
cgccgctagaccacccggatggtttctggactctccggatcgcccgtgga
atcccccaaccttctcaccggcactcttggttgtgactgagggcgataat
gcgaccttcacgtgctcgttctccaacacctccgaatcattcgtgctgaa
ctggtaccgcatgagcccgtcaaaccagaccgacaagctcgccgcgtttc
cggaagatcggtcgcaaccgggacaggattgtcggttccgcgtgactcaa
ctgccgaatggcagagacttccacatgagcgtggtccgcgctaggcgaaa
cgactccgggacctacctgtgcggagccatctcgctggcgcctaaggccc
aaatcaaagagagcttgagggccgaactgagagtgaccgagcgcagagct
gaggtgccaactgcacatccatccccatcgcctcggcctgcggggcagtt
tcagaccctggtcacgaccactccggcgccgcgcccaccgactccggccc
caactatcgcgagccagcccctgtcgctgaggccggaagcatgccgccct
gccgccggaggtgctgtgcatacccggggattggacttcgcatgcgacat
ctacatttgggctcctctcgccggaacttgtggcgtgctccttctgtccc
tggtcatcaccctgtactgcaagcggggtcggaaaaagcttctgtacatt
ttcaagcagcccttcatgaggcccgtgcaaaccacccaggaggaggacgg
ttgctcctgccggttccccgaagaggaagaaggaggttgcgagctgcgcg
tgaagttctcccggagcgccgacgcccccgcctataagcagggccagaac
cagctgtacaacgaactgaacctgggacggcgggaagagtacgatgtgct
ggacaagcggcgcggccgggaccccgaaatgggcgggaagcctagaagaa
agaaccctcaggaaggcctgtataacgagctgcagaaggacaagatggcc
gaggcctactccgaaattgggatgaagggagagcggcggaggggaaaggg
gcacgacggcctgtaccaaggactgtccaccgccaccaaggacacatacg
atgccctgcacatgcaggcccttccccctcgc.

[0400] In another aspect, the present invention provides a population of CAR-expressing cells, e.g., CART cells or CAR-expressing NK cells. In some embodiments, the population of CAR-expressing cells comprises a mixture of cells expressing different CARs. For example, in one embodiment, the population of CAR-expressing cells (e.g., CART cells or CAR-expressing NK cells) can include a first cell expressing a CAR having an anti-BCMA binding domain described herein, and a second cell expressing a CAR having a different anti-BCMA binding domain, e.g., an anti-BCMA binding domain described herein that differs from the anti-BCMA binding domain in the CAR expressed by the first cell. As another example, the population of CAR-expressing cells can include a first cell expressing a CAR that includes an anti-BCMA binding domain, e.g., as described herein, and a second cell expressing a CAR that includes an antigen binding domain to a target other than BCMA (e.g., CD19, CD20, CS-1, kappa light chain, CD139, Lewis Y antigen, or CD38). In one embodiment, the population of CAR-expressing cells includes a first cell expressing a CAR comprising an anti-BCMA binding domain, e.g., as described herein, and a second cell expressing a CAR comprising an antigen binding domain that targets CD19 (CD19 CAR). In one embodiment, the population of CAR-expressing cells includes, e.g., a first cell expressing a CAR that includes a primary intracellular signaling domain, and a second cell expressing a CAR that includes a secondary signaling domain.

[0401] In another aspect, the present invention provides a population of cells wherein at least one cell in the population expresses a CAR having an anti-BCMA domain described herein, and a second cell expressing another agent, e.g., an agent which enhances the activity of a CAR-expressing cell. For example, in one embodiment, the agent can be an agent which inhibits an inhibitory molecule. Inhibitory molecules, e.g., can, in some embodiments, decrease the ability of a CAR-expressing cell to mount an immune effector response. Examples of inhibitory molecules include PD1, PD-L1, PD-L2, CTLA4, TIM3, CEACAM (e.g., CEACAM-1, CEACAM-3 and/or CEACAM-5), LAG3, VISTA, BTLA, TIGIT, LAIR1, CD160, 2B4, CD80, CD86, B7-H3 (CD276), B7-H4 (VTCN1), HVEM (TNFRSF14 or CD270), KIR, A2aR, MHC class I, MHC class II, GAL9, adenosine, and TGFR beta. In one embodiment, the agent which inhibits an inhibitory molecule comprises a first polypeptide, e.g., an inhibitory molecule, associated with a second polypeptide that provides a positive signal to the cell, e.g., an intracellular signaling domain described herein. In one embodiment, the agent comprises a first polypeptide, e.g., of an inhibitory molecule such as PD1, PD-L1, PD-L2, CTLA4, TIM3, CEACAM (e.g., CEACAM-1, CEACAM-3 and/or CEACAM-5), LAG3, VISTA, BTLA, TIGIT, LAIR1, CD160, 2B4, CD80, CD86, B7-H3 (CD276), B7-H4 (VTCN1), HVEM (TNFRSF14 or CD270), KIR, A2aR, MHC class I, MHC class II, GAL9, adenosine, and TGFR beta, or a fragment of any of these (e.g., at least a portion of an extracellular domain of any of these), and a second polypeptide which is an intracellular signaling domain described herein (e.g., comprising a costimulatory domain (e.g., 41BB, CD27, ICOS, or CD28, e.g., as described herein) and/or a primary signaling domain (e.g., a CD3 zeta signaling domain described herein). In one embodiment, the agent comprises a first polypeptide of PD1 or a fragment thereof (e.g., at least a portion of the extracellular domain of PD1), and a second polypeptide of an intracellular signaling domain described herein (e.g., a CD28 signaling domain described herein and/or a CD3 zeta signaling domain described herein).

[0402] In one aspect, the present invention provides methods comprising administering a population of CAR-expressing cells (e.g., CART cells or CAR-expressing NK cells), e.g., a mixture of cells expressing different CARs, in combination with another agent, e.g., a kinase inhibitor, such as a kinase inhibitor described herein. In another aspect, the present invention provides methods comprising administering a population of cells wherein at least one cell in the population expresses a CAR having an anti-cancer associated antigen binding domain as described herein, and a second cell expressing another agent, e.g., an agent which enhances the activity of a CAR-expressing cell, in combination with another agent, e.g., a kinase inhibitor, such as a kinase inhibitor described herein.

### Natural Killer Cell Receptor (NKR) CARs

[0403] In an embodiment, the CAR molecule described herein comprises one or more components of a natural killer cell receptor (NKR), thereby forming an NKR-CAR. The NKR component can be a transmembrane domain, a hinge domain, or a cytoplasmic domain from any of the following natural killer cell receptors: killer cell immunoglobulin-like receptor (KIR), e.g., KIR2DL1, KIR2DL2/L3, KIR2DL4, KIR2DL5A, KIR2DL5B, KIR2DS1, KIR2DS2, KIR2DS3, KIR2DS4, DIR2DS5, KIR3DL1/S1, KIR3DL2, KIR3DL3, KIR2DP1, and KIR3DP1; natural cyotoxicity receptor (NCR), e.g., NKp30, NKp44, NKp46; signaling lymphocyte activation molecule (SLAM) family of immune cell receptors, e.g., CD48, CD229, 2B4, CD84, NTB-A, CRACC, BLAME, and CD2F-10; Fc receptor (FcR), e.g., CD16, and CD64; and Ly49 receptors, e.g., LY49A, LY49C. The NKR-CAR molecules described herein may interact with an adaptor molecule or intracellular signaling domain, e.g., DAP12. Exemplary configurations and sequences of CAR molecules comprising NKR components are described in International Publication No. WO2014/145252, the contents of which are hereby incorporated by reference.

### Strategies for Regulating Chimeric Antigen Receptors

[0404] There are many ways CAR activities can be regulated. In some embodiments, a regulatable CAR (RCAR) where the CAR activity can be controlled is desirable to optimize the safety and efficacy of a CAR therapy. For example, inducing apoptosis using, e.g., a caspase fused to a dimerization domain (see, e.g., Di et al., N Engl. J. Med. 2011 Nov. 3; 365(18):1673-1683), can be used as a safety switch in the CAR therapy of the instant invention. In another example, CAR-expressing cells can also express an inducible Caspase-9 (iCaspase-9) molecule that, upon administration of a dimerizer drug (e.g., rimiducid (also called AP1903 (Bellicum Pharmaceuticals) or AP20187 (Ariad)) leads to activation of the Caspase-9 and apoptosis of the cells. The iCaspase-9 molecule contains a chemical inducer of dimerization (CID) binding domain that mediates dimerization in the presence of a CID. This results in inducible and selective depletion of CAR-expressing cells. In some cases, the iCaspase-9 molecule is encoded by a nucleic acid molecule separate from the CAR-encoding vector(s). In some cases, the iCaspase-9 molecule is encoded by the same nucleic acid molecule as the CAR-encoding vector. The iCaspase-9 can provide a safety switch to avoid any toxicity of CAR-expressing cells. See, e.g., Song et al. Cancer Gene Ther. 2008; 15(10):667-75; Clinical Trial Id. No. NCT02107963; and Di Stasi et al. N. Engl. J. Med. 2011; 365:1673-83.

[0405] Alternative strategies for regulating the CAR therapy of the instant invention include utilizing small molecules or antibodies that deactivate or turn off CAR activity, e.g., by deleting CAR-expressing cells, e.g., by inducing antibody dependent cell-mediated cytotoxicity (ADCC). For example, CAR-expressing cells described herein may also express an antigen that is recognized by molecules capable of inducing cell death, e.g., ADCC or compliment-induced cell death. For example, CAR expressing cells described herein may also express a receptor capable of being targeted by an antibody or antibody fragment. Examples of such receptors include EpCAM, VEGFR, integrins (e.g., integrins αvβ3, α4, αI¾β3, α4β7, α5β1, αvβ3, αv), members of the TNF receptor superfamily (e.g., TRAIL-R1, TRAIL-R2), PDGF Receptor, interferon receptor, folate receptor, GPNMB, ICAM-1, HLA-DR, CEA, CA-125, MUC1, TAG-72, IL-6 receptor, 5T4, GD2, GD3, CD2, CD3, CD4, CD5, CD1 1, CD1 1a/LFA-1, CD15, CD18/ITGB2, CD19, CD20, CD22, CD23/1gE Receptor, CD25, CD28, CD30, CD33, CD38, CD40, CD41, CD44, CD51, CD52, CD62L, CD74, CD80, CD125, CD147/basigin, CD152/CTLA-4, CD154/CD40L, CD195/CCR5, CD319/SLAMF7, and EGFR, and truncated versions thereof (e.g., versions preserving one or more extracellular epitopes but lacking one or more regions within the cytoplasmic domain). For example, CAR-expressing cells described herein may also express a truncated epidermal growth factor receptor (EGFR) which lacks signaling capacity but retains the epitope that is recognized by molecules capable of inducing ADCC, e.g., cetuximab (ERBITUX®), such that administration of cetuximab induces ADCC and subsequent depletion of the CAR-expressing cells (see, e.g., WO2011/056894, and Jonnalagadda et al., Gene Ther. 2013; 20(8)853-860). Another strategy includes expressing a highly compact marker/suicide gene that combines target epitopes from both CD32 and CD20 antigens in the CAR-expressing cells described herein, which binds rituximab, resulting in selective depletion of the CAR-expressing cells, e.g., by ADCC (see, e.g., Philip et al., Blood. 2014; 124(8)1277-1287). Other methods for depleting CAR-expressing cells described herein include administration of CAMPATH®, a monoclonal anti-CD52 antibody that selectively binds and targets mature lymphocytes, e.g., CAR-expressing cells, for destruction, e.g., by inducing ADCC. In other embodiments, CAR-expressing cells can be selectively targeted using a CAR ligand, e.g., an anti-idiotypic antibody. In some embodiments, the anti-idiotypic antibody can cause effector cell activity, e.g, ADCC or ADC activities, thereby reducing the number of CAR-expressing cells. In other embodiments, the CAR ligand, e.g., the anti-idiotypic antibody, can be coupled to an agent that induces cell killing, e.g., a toxin, thereby reducing the number of CAR-expressing cells. Alternatively, the CAR molecules themselves can be configured such that the activity can be regulated, e.g., turned on and off, as described below.

[0406] In some embodiments, a RCAR comprises a set of polypeptides, typically two in the simplest embodiments, in which the components of a standard CAR described herein, e.g., an antigen binding domain and an intracellular signaling domain, are partitioned on separate polypeptides or members. In some embodiments, the set of polypeptides include a dimerization switch that, upon the presence of a dimerization molecule, can couple the polypeptides to one another, e.g., can couple an antigen binding domain to an intracellular signaling domain. Additional description and exemplary configurations of such regulatable CARs are provided herein and in International Publication No. WO 2015/090229, hereby incorporated by reference in its entirety.

[0407] In an embodiment, an RCAR comprises two polypeptides or members: 1) an intracellular signaling member comprising an intracellular signaling domain, e.g., a primary intracellular signaling domain described herein, and a first switch domain; 2) an antigen binding member comprising an antigen binding domain, e.g., that targets a tumor antigen described herein, as described herein and a second switch domain. Optionally, the RCAR comprises a transmembrane domain described herein. In an embodiment, a transmembrane domain can be disposed on the intracellular signaling member, on the antigen binding member, or on both. (Unless otherwise indicated, when members or elements of an RCAR are described herein, the order can be as provided, but other orders are included as well. In other words, in an embodiment, the order is as set out in the text, but in other embodiments, the order can be different. E.g., the order of elements on one side of a transmembrane region can be different from the example, e.g., the placement of a switch domain relative to a intracellular signaling domain can be different, e.g., reversed).

[0408] In an embodiment, the first and second switch domains can form an intracellular or an extracellular dimerization switch. In an embodiment, the dimerization switch can be a homodimerization switch, e.g., where the first and second switch domain are the same, or a heterodimerization switch, e.g., where the first and second switch domain are different from one another.

[0409] In embodiments, an RCAR can comprise a “multi switch.” A multi switch can comprise heterodimerization switch domains or homodimerization switch domains. A multi switch comprises a plurality of, e.g., 2, 3, 4, 5, 6, 7, 8, 9, or 10, switch domains, independently, on a first member, e.g., an antigen binding member, and a second member, e.g., an intracellular signaling member. In an embodiment, the first member can comprise a plurality of first switch domains, e.g., FKBP-based switch domains, and the second member can comprise a plurality of second switch domains, e.g., FRB-based switch domains. In an embodiment, the first member can comprise a first and a second switch domain, e.g., a FKBP-based switch domain and a FRB-based switch domain, and the second member can comprise a first and a second switch domain, e.g., a FKBP-based switch domain and a FRB-based switch domain.

[0410] In an embodiment, the intracellular signaling member comprises one or more intracellular signaling domains, e.g., a primary intracellular signaling domain and one or more costimulatory signaling domains.

[0411] In an embodiment, the antigen binding member may comprise one or more intracellular signaling domains, e.g., one or more costimulatory signaling domains. In an embodiment, the antigen binding member comprises a plurality, e.g., 2 or 3 costimulatory signaling domains described herein, e.g., selected from 4-1BB, CD28, CD27, ICOS, and OX40, and in embodiments, no primary intracellular signaling domain. In an embodiment, the antigen binding member comprises the following costimulatory signaling domains, from the extracellular to intracellular direction: 4-1BB-CD27; 4-1BB-CD27; CD27-4-1BB; 4-1BB-CD28; CD28-4-1BB; OX40-CD28; CD28-OX40; CD28-4-1BB; or 4-1BB-CD28. In such embodiments, the intracellular binding member comprises a CD3zeta domain. In one such embodiment the RCAR comprises (1) an antigen binding member comprising, an antigen binding domain, a transmembrane domain, and two costimulatory domains and a first switch domain; and (2) an intracellular signaling domain comprising a transmembrane domain or membrane tethering domain and at least one primary intracellular signaling domain, and a second switch domain.

[0412] An embodiment provides RCARs wherein the antigen binding member is not tethered to the surface of the CAR cell. This allows a cell having an intracellular signaling member to be conveniently paired with one or more antigen binding domains, without transforming the cell with a sequence that encodes the antigen binding member. In such embodiments, the RCAR comprises: 1) an intracellular signaling member comprising: a first switch domain, a transmembrane domain, an intracellular signaling domain, e.g., a primary intracellular signaling domain, and a first switch domain; and 2) an antigen binding member comprising: an antigen binding domain, and a second switch domain, wherein the antigen binding member does not comprise a transmembrane domain or membrane tethering domain, and, optionally, does not comprise an intracellular signaling domain. In some embodiments, the RCAR may further comprise 3) a second antigen binding member comprising: a second antigen binding domain, e.g., a second antigen binding domain that binds a different antigen than is bound by the antigen binding domain; and a second switch domain.

[0413] Also provided herein are RCARs wherein the antigen binding member comprises bispecific activation and targeting capacity. In this embodiment, the antigen binding member can comprise a plurality, e.g., 2, 3, 4, or 5 antigen binding domains, e.g., scFvs, wherein each antigen binding domain binds to a target antigen, e.g. different antigens or the same antigen, e.g., the same or different epitopes on the same antigen. In an embodiment, the plurality of antigen binding domains are in tandem, and optionally, a linker or hinge region is disposed between each of the antigen binding domains. Suitable linkers and hinge regions are described herein.

[0414] An embodiment provides RCARs having a configuration that allows switching of proliferation. In this embodiment, the RCAR comprises: 1) an intracellular signaling member comprising: optionally, a transmembrane domain or membrane tethering domain; one or more co-stimulatory signaling domain, e.g., selected from 4-1BB, CD28, CD27, ICOS, and OX40, and a switch domain; and 2) an antigen binding member comprising: an antigen binding domain, a transmembrane domain, and a primary intracellular signaling domain, e.g., a CD3zeta domain, wherein the antigen binding member does not comprise a switch domain, or does not comprise a switch domain that dimerizes with a switch domain on the intracellular signaling member. In an embodiment, the antigen binding member does not comprise a co-stimulatory signaling domain. In an embodiment, the intracellular signaling member comprises a switch domain from a homodimerization switch. In an embodiment, the intracellular signaling member comprises a first switch domain of a heterodimerization switch and the RCAR comprises a second intracellular signaling member which comprises a second switch domain of the heterodimerization switch. In such embodiments, the second intracellular signaling member comprises the same intracellular signaling domains as the intracellular signaling member. In an embodiment, the dimerization switch is intracellular. In an embodiment, the dimerization switch is extracellular.

[0415] In any of the RCAR configurations described here, the first and second switch domains comprise a FKBP-FRB based switch as described herein.

[0416] Also provided herein are cells comprising an RCAR described herein. Any cell that is engineered to express a RCAR can be used as a RCARX cell. In an embodiment the RCARX cell is a T cell, and is referred to as a RCART cell. In an embodiment the RCARX cell is an NK cell, and is referred to as a RCARN cell.

[0417] Also provided herein are nucleic acids and vectors comprising RCAR encoding sequences. Sequence encoding various elements of an RCAR can be disposed on the same nucleic acid molecule, e.g., the same plasmid or vector, e.g., viral vector, e.g., lentiviral vector. In an embodiment, (i) sequence encoding an antigen binding member and (ii) sequence encoding an intracellular signaling member, can be present on the same nucleic acid, e.g., vector. Production of the corresponding proteins can be achieved, e.g., by the use of separate promoters, or by the use of a bicistronic transcription product (which can result in the production of two proteins by cleavage of a single translation product or by the translation of two separate protein products). In an embodiment, a sequence encoding a cleavable peptide, e.g., a P2A or F2A sequence, is disposed between (i) and (ii). In an embodiment, a sequence encoding an IRES, e.g., an EMCV or EV71 IRES, is disposed between (i) and (ii). In these embodiments, (i) and (ii) are transcribed as a single RNA. In an embodiment, a first promoter is operably linked to (i) and a second promoter is operably linked to (ii), such that (i) and (ii) are transcribed as separate mRNAs.

[0418] Alternatively, the sequence encoding various elements of an RCAR can be disposed on the different nucleic acid molecules, e.g., different plasmids or vectors, e.g., viral vector, e.g., lentiviral vector. E.g., the (i) sequence encoding an antigen binding member can be present on a first nucleic acid, e.g., a first vector, and the (ii) sequence encoding an intracellular signaling member can be present on the second nucleic acid, e.g., the second vector.

[0419] Dimerization Switches

[0420] Dimerization switches can be non-covalent or covalent. In a non-covalent dimerization switch, the dimerization molecule promotes a non-covalent interaction between the switch domains. In a covalent dimerization switch, the dimerization molecule promotes a covalent interaction between the switch domains.

[0421] In an embodiment, the RCAR comprises a FKBP/FRAP, or FKBP/FRB-based dimerization switch. FKBP12 (FKBP, or FK506 binding protein) is an abundant cytoplasmic protein that serves as the initial intracellular target for the natural product immunosuppressive drug, rapamycin. Rapamycin binds to FKBP and to the large PI3K homolog FRAP (RAFT, mTOR). FRB is a 93 amino acid portion of FRAP, that is sufficient for binding the FKBP-rapamycin complex (Chen, J., Zheng, X. F., Brown, E. J. & Schreiber, S. L. (1995) Identification of an 11-kDa FKBP12-rapamycin-binding domain within the 289-kDa FKBP12-rapamycin-associated protein and characterization of a critical serine residue. Proc Natl Acad Sci USA 92: 4947-51.)

[0422] In embodiments, an FKBP/FRAP, e.g., an FKBP/FRB, based switch can use a dimerization molecule, e.g., rapamycin or a rapamycin analog.

[0423] The amino acid sequence of FKBP is as follows:

(SEQ ID NO: 275)
D V P D Y A S L G G P S S P K K K R K V S R G V Q
V E T I S P G D G R T F P K R G Q T C V V H Y T G
M L E D G K K F D S S R D R N K P F K F M L G K Q
E V I R G W E E G V A Q M S V G Q R A K L T I S P
D Y A Y G A T G H P G I I P P H A T L V F D V E L
L K L E T S Y

[0424] In embodiments, an FKBP switch domain can comprise a fragment of FKBP having the ability to bind with FRB, or a fragment or analog thereof, in the presence of rapamycin or a rapalog, e.g., the underlined portion of SEQ ID NO: 275, which is:

(SEQ ID NO: 276)
V Q V E T I S P G D G R T F P K R G Q T C V V H Y
T G M L E D G K K F D S S R D R N K P F K F M L G
K Q E V I R G W E E G V A Q M S V G Q R A K L T I
S P D Y A Y G A T G H P G I I P P H A T L V F D V
E L L K L E T S

[0425] The amino acid sequence of FRB is as follows:

(SEQ ID NO: 277)
[sequence omitted]

[0426] “FKBP/FRAP, e.g., an FKBP/FRB, based switch” as that term is used herein, refers to a dimerization switch comprising: a first switch domain, which comprises an FKBP fragment or analog thereof having the ability to bind with FRB, or a fragment or analog thereof, in the presence of rapamycin or a rapalog, e.g., RAD001, and has at least 70, 75, 80, 85, 90, 95, 96, 97, 98, or 99% identity with, or differs by no more than 30, 25, 20, 15, 10, 5, 4, 3, 2, or 1 amino acid residues from, the FKBP sequence of SEQ ID NO: 275 or 276; and a second switch domain, which comprises an FRB fragment or analog thereof having the ability to bind with FRB, or a fragment or analog thereof, in the presence of rapamycin or a rapalog, and has at least 70, 75, 80, 85, 90, 95, 96, 97, 98, or 99% identity with, or differs by no more than 30, 25, 20, 15, 10, 5, 4, 3, 2, or 1 amino acid residues from, the FRB sequence of SEQ ID NO: 277. In an embodiment, a RCAR described herein comprises one switch domain comprises amino acid residues disclosed in SEQ ID NO: 275 (or SEQ ID NO: 276), and one switch domain comprises amino acid residues disclosed in SEQ ID NO: 277.

[0427] In embodiments, the FKBP/FRB dimerization switch comprises a modified FRB switch domain that exhibits altered, e.g., enhanced, complex formation between an FRB-based switch domain, e.g., the modified FRB switch domain, a FKBP-based switch domain, and the dimerization molecule, e.g., rapamycin or a rapalogue, e.g., RAD001. In an embodiment, the modified FRB switch domain comprises one or more mutations, e.g., 2, 3, 4, 5, 6, 7, 8, 9, 10 or more, selected from mutations at amino acid position(s) L2031, E2032, 52035, R2036, F2039, G2040, T2098, W2101, D2102, Y2105, and F2108, where the wild-type amino acid is mutated to any other naturally-occurring amino acid. In an embodiment, a mutant FRB comprises a mutation at E2032, where E2032 is mutated to phenylalanine (E2032F), methionine (E2032M), arginine (E2032R), valine (E2032V), tyrosine (E2032Y), isoleucine (E20321), e.g., SEQ ID NO: 278, or leucine (E2032L), e.g., SEQ ID NO: 279. In an embodiment, a mutant FRB comprises a mutation at T2098, where T2098 is mutated to phenylalanine (T2098F) or leucine (T2098L), e.g., SEQ ID NO: 280. In an embodiment, a mutant FRB comprises a mutation at E2032 and at T2098, where E2032 is mutated to any amino acid, and where T2098 is mutated to any amino acid, e.g., SEQ ID NO: 281. In an embodiment, a mutant FRB comprises an E20321 and a T2098L mutation, e.g., SEQ ID NO: 282. In an embodiment, a mutant FRB comprises an E2032L and a T2098L mutation, e.g., SEQ ID NO: 283.

TABLE 17
Exemplary mutant FRB having increased affinity for a dimerization
molecule.

| | | EQ |
|---|---|---|
| | | ID |
| FRB mutant | Amino Acid Sequence | NO: |
| E2032I mutant | ILWHEMWHEGLIEASRLYFGERNVKGMFEVLEPLHAMMERGPQTLKETSFNQAYGR | |
| | DLMEAQEWCRKYMKSGNVKDLTQAWDLYYHVFRRISKTS | 78 |
| E2032L mutant | ILWHEMWHEGLLEASRLYFGERNVKGMFEVLEPLHAMMERGPQTLKETSFNQAYGR | |
| | DLMEAQEWCRKYMKSGNVKDLTQAWDLYYHVFRRISKTS | 79 |
| T2098L mutant | ILWHEMWHEGLEEASRLYFGERNVKGMFEVLEPLHAMMERGPQTLKETSFNQAYGR | |
| | DLMEAQEWCRKYMKSGNVKDLLQAWDLYYHVFRRISKTS | 80 |
| E2032, T2098 | ILWHEMWHEGLXEASRLYFGERNVKGMFEVLEPLHAMMERGPQTLKETSFNQAYGR | |
| mutant | DLMEAQEWCRKYMKSGNVKDLXQAWDLYYHVFRRISKTS | 81 |
| E2032I, T2098L | ILWHEMWHEGLIEASRLYFGERNVKGMFEVLEPLHAMMERGPQTLKETSFNQAYGR | |
| mutant | DLMEAQEWCRKYMKSGNVKDLLQAWDLYYHVFRRISKTS | 82 |
| E2032L,T2098L | ILWHEMWHEGLLEASRLYFGERNVKGMFEVLEPLHAMMERGPQTLKETSFNQAYGR | |
| mutant | DLMEAQEWCRKYMKSGNVKDLLQAWDLYYHVFRRISKTS | 83 |

[0428] Other suitable dimerization switches include a GyrB-GyrB based dimerization switch, a Gibberellin-based dimerization switch, a tag/binder dimerization switch, and a halo-tag/snap-tag dimerization switch. Following the guidance provided herein, such switches and relevant dimerization molecules will be apparent to one of ordinary skill

[0429] Dimerization Molecule

[0430] Association between the switch domains is promoted by the dimerization molecule. In the presence of dimerization molecule interaction or association between switch domains allows for signal transduction between a polypeptide associated with, e.g., fused to, a first switch domain, and a polypeptide associated with, e.g., fused to, a second switch domain. In the presence of non-limiting levels of dimerization molecule signal transduction is increased by 1.1, 1.2, 1.3, 1.4, 1.5, 1.6, 1.7, 1.8, 1.9, 2, 5, 10, 50, 100 fold, e.g., as measured in a system described herein.

[0431] Rapamycin and rapamycin analogs (sometimes referred to as rapalogues), e.g., RAD001, can be used as dimerization molecules in a FKBP/FRB-based dimerization switch described herein. In an embodiment the dimerization molecule can be selected from rapamycin (sirolimus), RAD001 (everolimus), zotarolimus, temsirolimus, AP-23573 (ridaforolimus), biolimus and AP21967. Additional rapamycin analogs suitable for use with FKBP/FRB-based dimerization switches are further described in the section entitled “Combination Therapies”, or in the subsection entitled “Combination with a Low, Immune Enhancing, Dose of an mTOR inhibitor”.

### Split CAR

[0432] In some embodiments, the CAR-expressing cell uses a split CAR. The split CAR approach is described in more detail in publications WO2014/055442 and WO2014/055657, incorporated herein by reference. Briefly, a split CAR system comprises a cell expressing a first CAR having a first antigen binding domain and a costimulatory domain (e.g., 41BB), and the cell also expresses a second CAR having a second antigen binding domain and an intracellular signaling domain (e.g., CD3 zeta). When the cell encounters the first antigen, the costimulatory domain is activated, and the cell proliferates. When the cell encounters the second antigen, the intracellular signaling domain is activated and cell-killing activity begins. Thus, the CAR-expressing cell is only fully activated in the presence of both antigens. In embodiments the first antigen binding domain recognizes BCMA, e.g., comprises an antigen binding domain described herein, and the second antigen binding domain recognizes an antigen expressed on acute myeloid leukemia cells, e.g., CD123, CLL-1, CD34, FLT3, or folate receptor beta. In embodiments the first antigen binding domain recognizes BCMA, e.g., comprises an antigen binding domain described herein, and the second antigen binding domain recognizes an antigen expressed on B-cells, e.g., CD10, CD19, CD20, CD22, CD34, CD123, FLT-3, ROR1, CD79b, CD179b, or CD79a.

[0433] Stability and Mutations

[0434] The stability of an anti-BCMA binding domain, e.g., scFv molecules (e.g., soluble scFv) can be evaluated in reference to the biophysical properties (e.g., thermal stability) of a conventional control scFv molecule or a full length antibody. In one embodiment, the humanized scFv has a thermal stability that is greater than about 0.1, about 0.25, about 0.5, about 0.75, about 1, about 1.25, about 1.5, about 1.75, about 2, about 2.5, about 3, about 3.5, about 4, about 4.5, about 5, about 5.5, about 6, about 6.5, about 7, about 7.5, about 8, about 8.5, about 9, about 9.5, about 10 degrees, about 11 degrees, about 12 degrees, about 13 degrees, about 14 degrees, or about 15 degrees Celsius than a control binding molecule (e.g. a conventional scFv molecule) in the described assays.

[0435] The improved thermal stability of the anti-BCMA binding domain, e.g., scFv is subsequently conferred to the entire CART-BCMA construct, leading to improved therapeutic properties of the CART-BCMA construct. The thermal stability of the anti-BCMA binding domain, e.g., scFv can be improved by at least about 2° C. or 3° C. as compared to a conventional antibody. In one embodiment, the anti-BCMA binding domain, e.g., scFv has a 1° C. improved thermal stability as compared to a conventional antibody. In another embodiment, the anti-BCMA binding domain, e.g., scFv has a 2° C. improved thermal stability as compared to a conventional antibody. In another embodiment, the scFv has a 4, 5, 6, 7, 8, 9, 10, 11, 12, 13, 14, 15° C. improved thermal stability as compared to a conventional antibody. Comparisons can be made, for example, between the scFv molecules disclosed herein and scFv molecules or Fab fragments of an antibody from which the scFv VH and VL were derived. Thermal stability can be measured using methods known in the art. For example, in one embodiment, Tm can be measured. Methods for measuring Tm and other methods of determining protein stability are described in more detail below.

[0436] Mutations in scFv (arising through humanization or direct mutagenesis of the soluble scFv) alter the stability of the scFv and improve the overall stability of the scFv and the CART33 construct. Stability of the human scFv can be compared against the murine scFv using measurements such as Tm, temperature denaturation and temperature aggregation.

[0437] The binding capacity of the mutant scFvs can be determined using assays described in the Examples.

[0438] In one embodiment, the anti-BCMA binding domain, e.g., scFv comprises at least one mutation arising from the humanization process such that the mutated scFv confers improved stability to the CART-BCMA construct. In another embodiment, the anti-BCMA binding domain, e.g., scFv comprises at least 1, 2, 3, 4, 5, 6, 7, 8, 9, 10 mutations arising from the humanization process such that the mutated scFv confers improved stability to the CART-BCMA construct.

[0439] Methods of Evaluating Protein Stability

[0440] The stability of an antigen binding domain may be assessed using, e.g., the methods described below. Such methods allow for the determination of multiple thermal unfolding transitions where the least stable domain either unfolds first or limits the overall stability threshold of a multidomain unit that unfolds cooperatively (e.g., a multidomain protein which exhibits a single unfolding transition). The least stable domain can be identified in a number of additional ways. Mutagenesis can be performed to probe which domain limits the overall stability. Additionally, protease resistance of a multidomain protein can be performed under conditions where the least stable domain is known to be intrinsically unfolded via DSC or other spectroscopic methods (Fontana, et al., (1997) Fold. Des., 2: R17-26; Dimasi et al. (2009) J. Mol. Biol. 393: 672-692). Once the least stable domain is identified, the sequence encoding this domain (or a portion thereof) may be employed as a test sequence in the methods.

[0441] a) Thermal Stability

[0442] The thermal stability of the compositions may be analyzed using a number of non-limiting biophysical or biochemical techniques known in the art. In certain embodiments, thermal stability is evaluated by analytical spectroscopy.

[0443] An exemplary analytical spectroscopy method is Differential Scanning calorimetry (DSC). DSC employs a calorimeter which is sensitive to the heat absorbances that accompany the unfolding of most proteins or protein domains (see, e.g. Sanchez-Ruiz, et al., Biochemistry, 27: 1648-52, 1988). To determine the thermal stability of a protein, a sample of the protein is inserted into the calorimeter and the temperature is raised until the Fab or scFv unfolds. The temperature at which the protein unfolds is indicative of overall protein stability.

[0444] Another exemplary analytical spectroscopy method is Circular Dichroism (CD) spectroscopy. CD spectrometry measures the optical activity of a composition as a function of increasing temperature. Circular dichroism (CD) spectroscopy measures differences in the absorption of left-handed polarized light versus right-handed polarized light which arise due to structural asymmetry. A disordered or unfolded structure results in a CD spectrum very different from that of an ordered or folded structure. The CD spectrum reflects the sensitivity of the proteins to the denaturing effects of increasing temperature and is therefore indicative of a protein's thermal stability (see van Mierlo and Steemsma, J. Biotechnol., 79(3):281-98, 2000).

[0445] Another exemplary analytical spectroscopy method for measuring thermal stability is Fluorescence Emission Spectroscopy (see van Mierlo and Steemsma, supra). Yet another exemplary analytical spectroscopy method for measuring thermal stability is Nuclear Magnetic Resonance (NMR) spectroscopy (see, e.g. van Mierlo and Steemsma, supra).

[0446] The thermal stability of a composition can be measured biochemically. An exemplary biochemical method for assessing thermal stability is a thermal challenge assay. In a “thermal challenge assay”, a composition is subjected to a range of elevated temperatures for a set period of time. For example, in one embodiment, test scFv molecules or molecules comprising scFv molecules are subject to a range of increasing temperatures, e.g., for 1-1.5 hours. The activity of the protein is then assayed by a relevant biochemical assay. For example, if the protein is a binding protein (e.g. an scFv or scFv-containing polypeptide) the binding activity of the binding protein may be determined by a functional or quantitative ELISA.

[0447] Such an assay may be done in a high-throughput format and those disclosed in the Examples using E. coli and high throughput screening. A library of anti-BCMA binding domain, e.g., scFv variants may be created using methods known in the art. Anti-BCMA binding domain, e.g., scFv expression may be induced and the anti-BCMA binding domain, e.g., scFv may be subjected to thermal challenge. The challenged test samples may be assayed for binding and those anti-BCMA binding domain, e.g., scFvs which are stable may be scaled up and further characterized.

[0448] Thermal stability is evaluated by measuring the melting temperature (Tm) of a composition using any of the above techniques (e.g. analytical spectroscopy techniques). The melting temperature is the temperature at the midpoint of a thermal transition curve wherein 50% of molecules of a composition are in a folded state (See e.g., Dimasi et al. (2009) J. Mol Biol. 393: 672-692). In one embodiment, Tm values for an anti-BCMA binding domain, e.g., scFv are about 40° C., 41° C., 42° C., 43° C., 44° C., 45° C., 46° C., 47° C., 48° C., 49° C., 50° C., 51° C., 52° C., 53° C., 54° C., 55° C., 56° C., 57° C., 58° C., 59° C., 60° C., 61° C., 62° C., 63° C., 64° C., 65° C., 66° C., 67° C., 68° C., 69° C., 70° C., 71° C., 72° C., 73° C., 74° C., 75° C., 76° C., 77° C., 78° C., 79° C., 80° C., 81° C., 82° C., 83° C., 84° C., 85° C., 86° C., 87° C., 88° C., 89° C., 90° C., 91° C., 92° C., 93° C., 94° C., 95° C., 96° C., 97° C., 98° C., 99° C., 100° C. In one embodiment, Tm values for an IgG is about 40° C., 41° C., 42° C., 43° C., 44° C., 45° C., 46° C., 47° C., 48° C., 49° C., 50° C., 51° C., 52° C., 53° C., 54° C., 55° C., 56° C., 57° C., 58° C., 59° C., 60° C., 61° C., 62° C., 63° C., 64° C., 65° C., 66° C., 67° C., 68° C., 69° C., 70° C., 71° C., 72° C., 73° C., 74° C., 75° C., 76° C., 77° C., 78° C., 79° C., 80° C., 81° C., 82° C., 83° C., 84° C., 85° C., 86° C., 87° C., 88° C., 89° C., 90° C., 91° C., 92° C., 93° C., 94° C., 95° C., 96° C., 97° C., 98° C., 99° C., 100° C. In one embodiment, Tm values for an multivalent antibody is about 40° C., 41° C., 42° C., 43° C., 44° C., 45° C., 46° C., 47° C., 48° C., 49° C., 50° C., 51° C., 52° C., 53° C., 54° C., 55° C., 56° C., 57° C., 58° C., 59° C., 60° C., 61° C., 62° C., 63° C., 64° C., 65° C., 66° C., 67° C., 68° C., 69° C., 70° C., 71° C., 72° C., 73° C., 74° C., 75° C., 76° C., 77° C., 78° C., 79° C., 80° C., 81° C., 82° C., 83° C., 84° C., 85° C., 86° C., 87° C., 88° C., 89° C., 90° C., 91° C., 92° C., 93° C., 94° C., 95° C., 96° C., 97° C., 98° C., 99° C., 100° C.

[0449] Thermal stability is also evaluated by measuring the specific heat or heat capacity (Cp) of a composition using an analytical calorimetric technique (e.g. DSC). The specific heat of a composition is the energy (e.g. in kcal/mol) is required to rise by 1° C., the temperature of 1 mol of water. As large Cp is a hallmark of a denatured or inactive protein composition. The change in heat capacity (ΔCp) of a composition is measured by determining the specific heat of a composition before and after its thermal transition. Thermal stability may also be evaluated by measuring or determining other parameters of thermodynamic stability including Gibbs free energy of unfolding (ΔG), enthalpy of unfolding (ΔH), or entropy of unfolding (ΔS). One or more of the above biochemical assays (e.g. a thermal challenge assay) are used to determine the temperature (i.e. the T_{C} value) at which 50% of the composition retains its activity (e.g. binding activity).

[0450] In addition, mutations to the anti-BCMA binding domain, e.g., scFv alter the thermal stability of the anti-BCMA binding domain, e.g., scFv compared with the unmutated anti-BCMA binding domain, e.g., scFv. When the human or humanized anti-BCMA binding domain, e.g., scFv is incorporated into a BCMA construct, the anti-BCMA binding domain, e.g., humanized scFv confers thermal stability to the overall anti-BCMA CART construct. In one embodiment, the anti-BCMA binding domain, e.g., scFv comprises a single mutation that confers thermal stability to the anti-BCMA binding domain, e.g., scFv. In another embodiment, the anti-BCMA binding domain, e.g., scFv comprises multiple mutations that confer thermal stability to the anti-BCMA binding domain, e.g., scFv. In one embodiment, the multiple mutations in the anti-BCMA binding domain, e.g., scFv have an additive effect on thermal stability of the anti-BCMA binding domain, e.g., scFv.

[0451] b) % Aggregation

[0452] The stability of a composition can be determined by measuring its propensity to aggregate. Aggregation can be measured by a number of non-limiting biochemical or biophysical techniques. For example, the aggregation of a composition may be evaluated using chromatography, e.g. Size-Exclusion Chromatography (SEC). SEC separates molecules on the basis of size. A column is filled with semi-solid beads of a polymeric gel that will admit ions and small molecules into their interior but not large ones. When a protein composition is applied to the top of the column, the compact folded proteins (i.e. non-aggregated proteins) are distributed through a larger volume of solvent than is available to the large protein aggregates. Consequently, the large aggregates move more rapidly through the column, and in this way the mixture can be separated or fractionated into its components. Each fraction can be separately quantified (e.g. by light scattering) as it elutes from the gel. Accordingly, the % aggregation of a composition can be determined by comparing the concentration of a fraction with the total concentration of protein applied to the gel. Stable compositions elute from the column as essentially a single fraction and appear as essentially a single peak in the elution profile or chromatogram.

[0453] c) Binding Affinity

[0454] The stability of a composition can be assessed by determining its target binding affinity. A wide variety of methods for determining binding affinity are known in the art. An exemplary method for determining binding affinity employs surface plasmon resonance. Surface plasmon resonance is an optical phenomenon that allows for the analysis of real-time biospecific interactions by detection of alterations in protein concentrations within a biosensor matrix, for example using the BIAcore system (Pharmacia Biosensor AB, Uppsala, Sweden and Piscataway, N.J.). For further descriptions, see Jonsson, U., et al. (1993) Ann. Biol. Clin. 51:19-26; Jonsson, U., i (1991) Biotechniques 11:620-627; Johnsson, B., et al. (1995) J. Mol. Recognit. 8:125-131; and Johnnson, B., et al. (1991) Anal. Biochem. 198:268-277.

[0455] In one aspect, the antigen binding domain of the CAR comprises an amino acid sequence that is homologous to an antigen binding domain amino acid sequence described herein, and the antigen binding domain retains the desired functional properties of the anti-BCMA antibody fragments described herein. In one specific aspect, the CAR composition of the invention comprises an antibody fragment. In a further aspect, that antibody fragment comprises an scFv.

[0456] In various aspects, the antigen binding domain of the CAR is engineered by modifying one or more amino acids within one or both variable regions (e.g., VH and/or VL), for example within one or more CDR regions and/or within one or more framework regions. In one specific aspect, the CAR composition of the invention comprises an antibody fragment. In a further aspect, that antibody fragment comprises a scFv.

[0457] It will be understood by one of ordinary skill in the art that the antibody or antibody fragment of the invention may further be modified such that they vary in amino acid sequence (e.g., from wild-type), but not in desired activity. For example, additional nucleotide substitutions, e.g., conservative substitutions leading to amino acid substitutions, e.g., conservative substitutions at “non-essential” amino acid residues may be made to the protein For example, a nonessential amino acid residue in a molecule may be replaced with another amino acid residue from the same side chain family. In another embodiment, a string of amino acids can be replaced with a structurally similar string that differs in order and/or composition of side chain family members, e.g., a conservative substitution, in which an amino acid residue is replaced with an amino acid residue having a similar side chain, may be made.

[0458] Families of amino acid residues having similar side chains have been defined in the art, including basic side chains (e.g., lysine, arginine, histidine), acidic side chains (e.g., aspartic acid, glutamic acid), uncharged polar side chains (e.g., glycine, asparagine, glutamine, serine, threonine, tyrosine, cysteine), nonpolar side chains (e.g., alanine, valine, leucine, isoleucine, proline, phenylalanine, methionine, tryptophan), beta-branched side chains (e.g., threonine, valine, isoleucine) and aromatic side chains (e.g., tyrosine, phenylalanine, tryptophan, histidine).

[0459] Percent identity in the context of two or more nucleic acids or polypeptide sequences, refers to two or more sequences that are the same. Two sequences are “substantially identical” if two sequences have a specified percentage of amino acid residues or nucleotides that are the same (e.g., 60% identity, optionally 70%, 71%. 72%. 73%, 74%, 75%, 76%, 77%, 78%, 79%, 80%, 81%, 82%, 83%, 84%, 85%, 86%, 87%, 88%, 89%, 90%, 91%, 92%, 93%, 94%, 95%, 96%, 97%, 98%, 99% identity over a specified region, or, when not specified, over the entire sequence), when compared and aligned for maximum correspondence over a comparison window, or designated region as measured using one of the following sequence comparison algorithms or by manual alignment and visual inspection. Optionally, the identity exists over a region that is at least about 50 nucleotides (or 10 amino acids) in length, or more preferably over a region that is 100 to 500 or 1000 or more nucleotides (or 20, 50, 200 or more amino acids) in length.

[0460] For sequence comparison, typically one sequence acts as a reference sequence, to which test sequences are compared. When using a sequence comparison algorithm, test and reference sequences are entered into a computer, subsequence coordinates are designated, if necessary, and sequence algorithm program parameters are designated. Default program parameters can be used, or alternative parameters can be designated. The sequence comparison algorithm then calculates the percent sequence identities for the test sequences relative to the reference sequence, based on the program parameters. Methods of alignment of sequences for comparison are well known in the art. Optimal alignment of sequences for comparison can be conducted, e.g., by the local homology algorithm of Smith and Waterman, (1970) Adv. Appl. Math. 2:482c, by the homology alignment algorithm of Needleman and Wunsch, (1970) J. Mol. Biol. 48:443, by the search for similarity method of Pearson and Lipman, (1988) Proc. Nat'l. Acad. Sci. USA 85:2444, by computerized implementations of these algorithms (GAP, BESTFIT, FASTA, and TFASTA in the Wisconsin Genetics Software Package, Genetics Computer Group, 575 Science Dr., Madison, Wis.), or by manual alignment and visual inspection (see, e.g., Brent et al., (2003) Current Protocols in Molecular Biology).

[0461] Two examples of algorithms that are suitable for determining percent sequence identity and sequence similarity are the BLAST and BLAST 2.0 algorithms, which are described in Altschul et al., (1977) Nuc. Acids Res. 25:3389-3402; and Altschul et al., (1990) J. Mol. Biol. 215:403-410, respectively. Software for performing BLAST analyses is publicly available through the National Center for Biotechnology Information.

[0462] The percent identity between two amino acid sequences can also be determined using the algorithm of E. Meyers and W. Miller, (1988) Comput. Appl. Biosci. 4:11-17) which has been incorporated into the ALIGN program (version 2.0), using a PAM120 weight residue table, a gap length penalty of 12 and a gap penalty of 4. In addition, the percent identity between two amino acid sequences can be determined using the Needleman and Wunsch (1970) J. Mol. Biol. 48:444-453) algorithm which has been incorporated into the GAP program in the GCG software package (available at www.gcg.com), using either a Blossom 62 matrix or a PAM250 matrix, and a gap weight of 16, 14, 12, 10, 8, 6, or 4 and a length weight of 1, 2, 3, 4, 5, or 6.

[0463] In one aspect, the present invention contemplates modifications of the starting antibody or fragment (e.g., scFv) amino acid sequence that generate functionally equivalent molecules. For example, the VH or VL of an anti-BCMA binding domain, e.g., scFv, comprised in the CAR can be modified to retain at least about 70%, 71%. 72%. 73%, 74%, 75%, 76%, 77%, 78%, 79%, 80%, 81%, 82%, 83%, 84%, 85%, 86%, 87%, 88%, 89%, 90%, 91%, 92%, 93%, 94%, 95%, 96%, 97%, 98%, 99% identity of the starting VH or VL framework region of the anti-BCMA binding domain, e.g., scFv. The present invention contemplates modifications of the entire CAR construct, e.g., modifications in one or more amino acid sequences of the various domains of the CAR construct in order to generate functionally equivalent molecules. The CAR construct can be modified to retain at least about 70%, 71%. 72%. 73%, 74%, 75%, 76%, 77%, 78%, 79%, 80%, 81%, 82%, 83%, 84%, 85%, 86%, 87%, 88%, 89%, 90%, 91%, 92%, 93%, 94%, 95%, 96%, 97%, 98%, 99% identity of the starting CAR construct.

### RNA Transfection

[0464] Disclosed herein are methods for producing an in vitro transcribed RNA CAR. The present invention also includes a CAR encoding RNA construct that can be directly transfected into a cell. A method for generating mRNA for use in transfection can involve in vitro transcription (IVT) of a template with specially designed primers, followed by polyA addition, to produce a construct containing 3′ and 5′ untranslated sequence (“UTR”), a 5′ cap and/or Internal Ribosome Entry Site (IRES), the nucleic acid to be expressed, and a polyA tail, typically 50-2000 bases in length (SEQ ID NO:35). RNA so produced can efficiently transfect different kinds of cells. In one aspect, the template includes sequences for the CAR.

[0465] In one aspect the anti-BCMA CAR is encoded by a messenger RNA (mRNA). In one aspect the mRNA encoding the anti-BCMA CAR is introduced into an immune effector cell, e.g., a T cell or a NK cell, for production of a CAR-expressing cell (e.g., CART cell or CAR-expressing NK cell).

[0466] In one embodiment, the in vitro transcribed RNA CAR can be introduced to a cell as a form of transient transfection. The RNA is produced by in vitro transcription using a polymerase chain reaction (PCR)-generated template. DNA of interest from any source can be directly converted by PCR into a template for in vitro mRNA synthesis using appropriate primers and RNA polymerase. The source of the DNA can be, for example, genomic DNA, plasmid DNA, phage DNA, cDNA, synthetic DNA sequence or any other appropriate source of DNA. The desired temple for in vitro transcription is a CAR of the present invention. For example, the template for the RNA CAR comprises an extracellular region comprising a single chain variable domain of an anti-tumor antibody; a hinge region, a transmembrane domain (e.g., a transmembrane domain of CD8a); and a cytoplasmic region that includes an intracellular signaling domain, e.g., comprising the signaling domain of CD3-zeta and the signaling domain of 4-1BB.

[0467] In one embodiment, the DNA to be used for PCR contains an open reading frame. The DNA can be from a naturally occurring DNA sequence from the genome of an organism. In one embodiment, the nucleic acid can include some or all of the 5′ and/or 3′ untranslated regions (UTRs). The nucleic acid can include exons and introns. In one embodiment, the DNA to be used for PCR is a human nucleic acid sequence. In another embodiment, the DNA to be used for PCR is a human nucleic acid sequence including the 5′ and 3′ UTRs. The DNA can alternatively be an artificial DNA sequence that is not normally expressed in a naturally occurring organism. An exemplary artificial DNA sequence is one that contains portions of genes that are ligated together to form an open reading frame that encodes a fusion protein. The portions of DNA that are ligated together can be from a single organism or from more than one organism.

[0468] PCR is used to generate a template for in vitro transcription of mRNA which is used for transfection. Methods for performing PCR are well known in the art. Primers for use in PCR are designed to have regions that are substantially complementary to regions of the DNA to be used as a template for the PCR. “Substantially complementary,” as used herein, refers to sequences of nucleotides where a majority or all of the bases in the primer sequence are complementary, or one or more bases are non-complementary, or mismatched. Substantially complementary sequences are able to anneal or hybridize with the intended DNA target under annealing conditions used for PCR. The primers can be designed to be substantially complementary to any portion of the DNA template. For example, the primers can be designed to amplify the portion of a nucleic acid that is normally transcribed in cells (the open reading frame), including 5′ and 3′ UTRs. The primers can also be designed to amplify a portion of a nucleic acid that encodes a particular domain of interest. In one embodiment, the primers are designed to amplify the coding region of a human cDNA, including all or portions of the 5′ and 3′ UTRs. Primers useful for PCR can be generated by synthetic methods that are well known in the art. “Forward primers” are primers that contain a region of nucleotides that are substantially complementary to nucleotides on the DNA template that are upstream of the DNA sequence that is to be amplified. “Upstream” is used herein to refer to a location 5, to the DNA sequence to be amplified relative to the coding strand. “Reverse primers” are primers that contain a region of nucleotides that are substantially complementary to a double-stranded DNA template that are downstream of the DNA sequence that is to be amplified. “Downstream” is used herein to refer to a location 3′ to the DNA sequence to be amplified relative to the coding strand.

[0469] Any DNA polymerase useful for PCR can be used in the methods disclosed herein. The reagents and polymerase are commercially available from a number of sources.

[0470] Chemical structures with the ability to promote stability and/or translation efficiency may also be used. The RNA preferably has 5′ and 3′ UTRs. In one embodiment, the 5′ UTR is between one and 3000 nucleotides in length. The length of 5′ and 3′ UTR sequences to be added to the coding region can be altered by different methods, including, but not limited to, designing primers for PCR that anneal to different regions of the UTRs. Using this approach, one of ordinary skill in the art can modify the 5′ and 3′ UTR lengths required to achieve optimal translation efficiency following transfection of the transcribed RNA.

[0471] The 5′ and 3′ UTRs can be the naturally occurring, endogenous 5′ and 3′ UTRs for the nucleic acid of interest. Alternatively, UTR sequences that are not endogenous to the nucleic acid of interest can be added by incorporating the UTR sequences into the forward and reverse primers or by any other modifications of the template. The use of UTR sequences that are not endogenous to the nucleic acid of interest can be useful for modifying the stability and/or translation efficiency of the RNA. For example, it is known that AU-rich elements in 3′ UTR sequences can decrease the stability of mRNA. Therefore, 3′ UTRs can be selected or designed to increase the stability of the transcribed RNA based on properties of UTRs that are well known in the art.

[0472] In one embodiment, the 5′ UTR can contain the Kozak sequence of the endogenous nucleic acid. Alternatively, when a 5′ UTR that is not endogenous to the nucleic acid of interest is being added by PCR as described above, a consensus Kozak sequence can be redesigned by adding the 5′ UTR sequence. Kozak sequences can increase the efficiency of translation of some RNA transcripts, but does not appear to be required for all RNAs to enable efficient translation. The requirement for Kozak sequences for many mRNAs is known in the art. In other embodiments the 5′ UTR can be 5′UTR of an RNA virus whose RNA genome is stable in cells. In other embodiments various nucleotide analogues can be used in the 3′ or 5′ UTR to impede exonuclease degradation of the mRNA.

[0473] To enable synthesis of RNA from a DNA template without the need for gene cloning, a promoter of transcription should be attached to the DNA template upstream of the sequence to be transcribed. When a sequence that functions as a promoter for an RNA polymerase is added to the 5′ end of the forward primer, the RNA polymerase promoter becomes incorporated into the PCR product upstream of the open reading frame that is to be transcribed. In one preferred embodiment, the promoter is a T7 polymerase promoter, as described elsewhere herein. Other useful promoters include, but are not limited to, T3 and SP6 RNA polymerase promoters. Consensus nucleotide sequences for T7, T3 and SP6 promoters are known in the art.

[0474] In a preferred embodiment, the mRNA has both a cap on the 5′ end and a 3′ poly(A) tail which determine ribosome binding, initiation of translation and stability mRNA in the cell. On a circular DNA template, for instance, plasmid DNA, RNA polymerase produces a long concatameric product which is not suitable for expression in eukaryotic cells. The transcription of plasmid DNA linearized at the end of the 3′ UTR results in normal sized mRNA which is not effective in eukaryotic transfection even if it is polyadenylated after transcription.

[0475] On a linear DNA template, phage T7 RNA polymerase can extend the 3′ end of the transcript beyond the last base of the template (Schenborn and Mierendorf, Nuc Acids Res., 13:6223-36 (1985); Nacheva and Berzal-Herranz, Eur. J. Biochem., 270:1485-65 (2003).

[0476] The conventional method of integration of polyA/T stretches into a DNA template is molecular cloning. However polyA/T sequence integrated into plasmid DNA can cause plasmid instability, which is why plasmid DNA templates obtained from bacterial cells are often highly contaminated with deletions and other aberrations. This makes cloning procedures not only laborious and time consuming but often not reliable. That is why a method which allows construction of DNA templates with polyA/T 3′ stretch without cloning highly desirable.

[0477] The polyA/T segment of the transcriptional DNA template can be produced during PCR by using a reverse primer containing a polyT tail, such as 100T tail (SEQ ID NO: 31) (size can be 50-5000 T (SEQ ID NO: 32)), or after PCR by any other method, including, but not limited to, DNA ligation or in vitro recombination. Poly(A) tails also provide stability to RNAs and reduce their degradation. Generally, the length of a poly(A) tail positively correlates with the stability of the transcribed RNA. In one embodiment, the poly(A) tail is between 100 and 5000 adenosines (SEQ ID NO: 33).

[0478] Poly(A) tails of RNAs can be further extended following in vitro transcription with the use of a poly(A) polymerase, such as E. coli polyA polymerase (E-PAP). In one embodiment, increasing the length of a poly(A) tail from 100 nucleotides to between 300 and 400 nucleotides (SEQ ID NO: 34) results in about a two-fold increase in the translation efficiency of the RNA. Additionally, the attachment of different chemical groups to the 3′ end can increase mRNA stability. Such attachment can contain modified/artificial nucleotides, aptamers and other compounds. For example, ATP analogs can be incorporated into the poly(A) tail using poly(A) polymerase. ATP analogs can further increase the stability of the RNA.

[0479] 5′ caps on also provide stability to RNA molecules. In a preferred embodiment, RNAs produced by the methods disclosed herein include a 5′ cap. The 5′ cap is provided using techniques known in the art and described herein (Cougot, et al., Trends in Biochem. Sci., 29:436-444 (2001); Stepinski, et al., RNA, 7:1468-95 (2001); Elango, et al., Biochim. Biophys. Res. Commun., 330:958-966 (2005)).

[0480] The RNAs produced by the methods disclosed herein can also contain an internal ribosome entry site (IRES) sequence. The IRES sequence may be any viral, chromosomal or artificially designed sequence which initiates cap-independent ribosome binding to mRNA and facilitates the initiation of translation. Any solutes suitable for cell electroporation, which can contain factors facilitating cellular permeability and viability such as sugars, peptides, lipids, proteins, antioxidants, and surfactants can be included.

[0481] RNA can be introduced into target cells using any of a number of different methods, for instance, commercially available methods which include, but are not limited to, electroporation (Amaxa Nucleofector-II (Amaxa Biosystems, Cologne, Germany)), (ECM 830 (BTX) (Harvard Instruments, Boston, Mass.) or the Gene Pulser II (BioRad, Denver, Colo.), Multiporator (Eppendort, Hamburg Germany), cationic liposome mediated transfection using lipofection, polymer encapsulation, peptide mediated transfection, or biolistic particle delivery systems such as “gene guns” (see, for example, Nishikawa, et al. Hum Gene Ther., 12(8):861-70 (2001).

[0482] Non-Viral Delivery Methods

[0483] In some aspects, non-viral methods can be used to deliver a nucleic acid encoding a CAR described herein into a cell or tissue or a subject.

[0484] In some embodiments, the non-viral method includes the use of a transposon (also called a transposable element). In some embodiments, a transposon is a piece of DNA that can insert itself at a location in a genome, for example, a piece of DNA that is capable of self-replicating and inserting its copy into a genome, or a piece of DNA that can be spliced out of a longer nucleic acid and inserted into another place in a genome. For example, a transposon comprises a DNA sequence made up of inverted repeats flanking genes for transposition.

[0485] Exemplary methods of nucleic acid delivery using a transposon include a Sleeping Beauty transposon system (SBTS) and a piggyBac (PB) transposon system. See, e.g., Aronovich et al. Hum. Mol. Genet. 20.R1(2011):R14-20; Singh et al. Cancer Res. 15(2008):2961-2971; Huang et al. Mol. Ther. 16(2008):580-589; Grabundzija et al. Mol. Ther. 18(2010):1200-1209; Kebriaei et al. Blood. 122.21(2013):166; Williams. Molecular Therapy 16.9(2008):1515-16; Bell et al. Nat. Protoc. 2.12(2007):3153-65; and Ding et al. Cell. 122.3(2005):473-83, all of which are incorporated herein by reference.

[0486] The SBTS includes two components: 1) a transposon containing a transgene and 2) a source of transposase enzyme. The transposase can transpose the transposon from a carrier plasmid (or other donor DNA) to a target DNA, such as a host cell chromosome/genome. For example, the transposase binds to the carrier plasmid/donor DNA, cuts the transposon (including transgene(s)) out of the plasmid, and inserts it into the genome of the host cell. See, e.g., Aronovich et al. supra.

[0487] Exemplary transposons include a pT2-based transposon. See, e.g., Grabundzija et al. Nucleic Acids Res. 41.3(2013):1829-47; and Singh et al. Cancer Res. 68.8(2008): 2961-2971, all of which are incorporated herein by reference. Exemplary transposases include a Tcl/mariner-type transposase, e.g., the SB10 transposase or the SB11 transposase (a hyperactive transposase which can be expressed, e.g., from a cytomegalovirus promoter). See, e.g., Aronovich et al.; Kebriaei et al.; and Grabundzija et al., all of which are incorporated herein by reference.

[0488] Use of the SBTS permits efficient integration and expression of a transgene, e.g., a nucleic acid encoding a CAR described herein. Provided herein are methods of generating a cell, e.g., T cell or NK cell, that stably expresses a CAR described herein, e.g., using a transposon system such as SBTS.

[0489] In accordance with methods described herein, in some embodiments, one or more nucleic acids, e.g., plasmids, containing the SBTS components are delivered to a cell (e.g., T or NK cell). For example, the nucleic acid(s) are delivered by standard methods of nucleic acid (e.g., plasmid DNA) delivery, e.g., methods described herein, e.g., electroporation, transfection, or lipofection. In some embodiments, the nucleic acid contains a transposon comprising a transgene, e.g., a nucleic acid encoding a CAR described herein. In some embodiments, the nucleic acid contains a transposon comprising a transgene (e.g., a nucleic acid encoding a CAR described herein) as well as a nucleic acid sequence encoding a transposase enzyme. In other embodiments, a system with two nucleic acids is provided, e.g., a dual-plasmid system, e.g., where a first plasmid contains a transposon comprising a transgene, and a second plasmid contains a nucleic acid sequence encoding a transposase enzyme. For example, the first and the second nucleic acids are co-delivered into a host cell.

[0490] In some embodiments, cells, e.g., T or NK cells, are generated that express a CAR described herein by using a combination of gene insertion using the SBTS and genetic editing using a nuclease (e.g., Zinc finger nucleases (ZFNs), Transcription Activator-Like Effector Nucleases (TALENs), the CRISPR/Cas system, or engineered meganuclease re-engineered homing endonucleases).

[0491] In some embodiments, use of a non-viral method of delivery permits reprogramming of cells, e.g., T or NK cells, and direct infusion of the cells into a subject. Advantages of non-viral vectors include but are not limited to the ease and relatively low cost of producing sufficient amounts required to meet a patient population, stability during storage, and lack of immunogenicity.

### Nucleic Acid Constructs Encoding a CAR

[0492] The present invention also provides nucleic acid molecules encoding one or more CAR constructs described herein. In one aspect, the nucleic acid molecule is provided as a messenger RNA transcript. In one aspect, the nucleic acid molecule is provided as a DNA construct.

[0493] Accordingly, in one aspect, the invention pertains to an isolated nucleic acid molecule encoding a chimeric antigen receptor (CAR), wherein the CAR comprises a anti-BCMA binding domain (e.g., a human anti-BCMA binding domain), a transmembrane domain, and an intracellular signaling domain comprising a stimulatory domain, e.g., a costimulatory signaling domain and/or a primary signaling domain, e.g., zeta chain. In one embodiment, the anti-BCMA binding domain is an anti-BCMA binding domain described herein, e.g., an anti-BCMA binding domain which comprises a sequence selected from a group consisting of SEQ ID NO: 39, SEQ ID NO: 40, SEQ ID NO: 41, SEQ ID NO: 42, SEQ ID NO: 43, SEQ ID NO: 44, SEQ ID NO: 45, SEQ ID NO: 46, SEQ ID NO: 47, SEQ ID NO: 48, SEQ ID NO: 49, SEQ ID NO: 50, SEQ ID NO: 51, SEQ ID NO: 52, SEQ ID NO: 53, SEQ ID NO: 129, SEQ ID NO: 130, SEQ ID NO: 131, SEQ ID NO: 132, SEQ ID NO: 133, SEQ ID NO: 134, SEQ ID NO: 135, SEQ ID NO: 136, SEQ ID NO: 137, SEQ ID NO: 138, SEQ ID NO: 139, SEQ ID NO: 140, SEQ ID NO: 141, SEQ ID NO: 142, SEQ ID NO: 143, SEQ ID NO:144, SEQ ID NO:145, SEQ ID NO:146, SEQ ID NO:147, SEQ ID NO:148 or SEQ ID NO:149, or a sequence with 95-99% identify thereof. In one embodiment, the transmembrane domain is transmembrane domain of a protein selected from the group consisting of the alpha, beta or zeta chain of the T-cell receptor, CD28, CD3 epsilon, CD45, CD4, CDS, CD8, CD9, CD16, CD22, CD33, CD37, CD64, CD80, CD86, CD134, CD137 and CD154. In one embodiment, the transmembrane domain comprises a sequence of SEQ ID NO: 6, or a sequence with 95-99% identity thereof. In one embodiment, the anti-BCMA binding domain is connected to the transmembrane domain by a hinge region, e.g., a hinge described herein. In one embodiment, the hinge region comprises SEQ ID NO:2 or SEQ ID NO:3 or SEQ ID NO:4 or SEQ ID NO:5, or a sequence with 95-99% identity thereof. In one embodiment, the isolated nucleic acid molecule further comprises a sequence encoding a costimulatory domain. In one embodiment, the costimulatory domain is a functional signaling domain of a protein selected from the group consisting of MHC class I molecule, TNF receptor proteins, Immunoglobulin-like proteins, cytokine receptors, integrins, signaling lymphocytic activation molecules (SLAM proteins), activating NK cell receptors, BTLA, a Toll ligand receptor, OX40, CD2, CD7, CD27, CD28, CD30, CD40, CDS, ICAM-1, LFA-1 (CD11a/CD18), 4-1BB (CD137), B7-H3, CDS, ICAM-1, ICOS (CD278), GITR, BAFFR, LIGHT, HVEM (LIGHTR), KIRDS2, SLAMF7, NKp80 (KLRF1), NKp44, NKp30, NKp46, CD19, CD4, CD8alpha, CD8beta, IL2R beta, IL2R gamma, IL7R alpha, ITGA4, VLA1, CD49a, ITGA4, IA4, CD49D, ITGA6, VLA-6, CD49f, ITGAD, CD11d, ITGAE, CD103, ITGAL, CD11a, LFA-1, ITGAM, CD11b, ITGAX, CD11c, ITGB1, CD29, ITGB2, CD18, LFA-1, ITGB7, NKG2D, NKG2C, TNFR2, TRANCE/RANKL, DNAM1 (CD226), SLAMF4 (CD244, 2B4), CD84, CD96 (Tactile), CEACAM1, CRTAM, Ly9 (CD229), CD160 (BY55), PSGL1, CD100 (SEMA4D), CD69, SLAMF6 (NTB-A, Ly108), SLAM (SLAMF1, CD150, IPO-3), BLAME (SLAMF8), SELPLG (CD162), LTBR, LAT, GADS, SLP-76, PAG/Cbp, CD19a, and a ligand that specifically binds with CD83. In one embodiment, the costimulatory domain comprises a sequence of SEQ ID NO:7, or a sequence with 95-99% identity thereof or a CD27 costimulatory domain having a sequence of SEQ ID NO:8 (or a sequence with 95-99% identity thereof) or a CD28 costimulatory domain having a sequence of SEQ ID NO:379 (or a sequence with 95-99% identity thereof) or a ICOS costimulatory domain having a sequence of SEQ ID NO: 381 (or a sequence with 95-99% identity thereof). In one embodiment, the intracellular signaling domain comprises a functional signaling domain of 4-1BB and a functional signaling domain of CD3 zeta. In one embodiment, the intracellular signaling domain comprises the sequence of SEQ ID NO: 7 or SEQ ID NO: 8, or a sequence with 95-99% identity thereof, and the sequence of SEQ ID NO: 9 or SEQ ID NO:10, or a sequence with 95-99% identity thereof, wherein the sequences comprising the intracellular signaling domain are expressed in the same frame and as a single polypeptide chain.

[0494] In another aspect, the invention pertains to an isolated nucleic acid molecule encoding a CAR construct comprising a leader sequence of SEQ ID NO: 1, a scFv domain having a sequence selected from the group consisting of SEQ ID NO: 39, SEQ ID NO: 40, SEQ ID NO: 41, SEQ ID NO: 42, SEQ ID NO: 43, SEQ ID NO: 44, SEQ ID NO: 45, SEQ ID NO: 46, SEQ ID NO: 47, SEQ ID NO: 48, SEQ ID NO: 49, SEQ ID NO: 50, SEQ ID NO: 51, SEQ ID NO: 52, SEQ ID NO: 53, SEQ ID NO: 129, SEQ ID NO: 130, SEQ ID NO: 131, SEQ ID NO: 132, SEQ ID NO: 133, SEQ ID NO: 134, SEQ ID NO: 135, SEQ ID NO: 136, SEQ ID NO: 137, SEQ ID NO: 138, SEQ ID NO: 139, SEQ ID NO: 140, SEQ ID NO: 141, SEQ ID NO: 142, SEQ ID NO: 143, SEQ ID NO:144, SEQ ID NO:145, SEQ ID NO:146, SEQ ID NO:147, SEQ ID NO:148 or SEQ ID NO:149 (or a sequence with 95-99% identify thereof), a hinge region of SEQ ID NO:2 or SEQ ID NO:3 or SEQ ID NO:4 or SEQ ID NO:5 (or a sequence with 95-99% identity thereof), a transmembrane domain having a sequence of SEQ ID NO: 6 (or a sequence with 95-99% identity thereof), a 4-1BB costimulatory domain having a sequence of SEQ ID NO:7 or a CD27 costimulatory domain having a sequence of SEQ ID NO:8 (or a sequence with 95-99% identity thereof) or a CD28 costimulatory domain having a sequence of SEQ ID NO:1104 (or a sequence with 95-99% identity thereof) or a ICOS costimulatory domain having a sequence of SEQ ID NO: 1106 (or a sequence with 95-99% identity thereof), and a CD3 zeta stimulatory domain having a sequence of SEQ ID NO:9 or SEQ ID NO:10 (or a sequence with 95-99% identity thereof).

[0495] In another aspect, the invention pertains to an isolated polypeptide molecule encoded by the nucleic acid molecule. In one embodiment, the isolated polypeptide molecule comprises a sequence selected from the group consisting of SEQ ID NO: 39, SEQ ID NO: 40, SEQ ID NO: 41, SEQ ID NO: 42, SEQ ID NO: 43, SEQ ID NO: 44, SEQ ID NO: 45, SEQ ID NO: 46, SEQ ID NO: 47, SEQ ID NO: 48, SEQ ID NO: 49, SEQ ID NO: 50, SEQ ID NO: 51, SEQ ID NO: 52, SEQ ID NO: 53, SEQ ID NO: 129, SEQ ID NO: 130, SEQ ID NO: 131, SEQ ID NO: 132, SEQ ID NO: 133, SEQ ID NO: 134, SEQ ID NO: 135, SEQ ID NO: 136, SEQ ID NO: 137, SEQ ID NO: 138, SEQ ID NO: 139, SEQ ID NO: 140, SEQ ID NO: 141, SEQ ID NO: 142, SEQ ID NO: 143, SEQ ID NO:144, SEQ ID NO:145, SEQ ID NO:146, SEQ ID NO:147, SEQ ID NO:148 and SEQ ID NO:149, or a sequence with 95-99% identify thereof.

[0496] In another aspect, the invention pertains to a nucleic acid molecule encoding a chimeric antigen receptor (CAR) molecule that comprises an anti-BCMA binding domain, a transmembrane domain, and an intracellular signaling domain comprising a stimulatory domain, and wherein said anti-BCMA binding domain comprises a sequence selected from the group consisting of SEQ ID NO: 39, SEQ ID NO: 40, SEQ ID NO: 41, SEQ ID NO: 42, SEQ ID NO: 43, SEQ ID NO: 44, SEQ ID NO: 45, SEQ ID NO: 46, SEQ ID NO: 47, SEQ ID NO: 48, SEQ ID NO: 49, SEQ ID NO: 50, SEQ ID NO: 51, SEQ ID NO: 52, SEQ ID NO: 53, SEQ ID NO: 129, SEQ ID NO: 130, SEQ ID NO: 131, SEQ ID NO: 132, SEQ ID NO: 133, SEQ ID NO: 134, SEQ ID NO: 135, SEQ ID NO: 136, SEQ ID NO: 137, SEQ ID NO: 138, SEQ ID NO: 139, SEQ ID NO: 140, SEQ ID NO: 141, SEQ ID NO: 142, SEQ ID NO: 143, SEQ ID NO:144, SEQ ID NO:145, SEQ ID NO:146, SEQ ID NO:147, SEQ ID NO:148 and SEQ ID NO:149, or a sequence with 95-99% identify thereof.

[0497] In one embodiment, the encoded CAR molecule further comprises a sequence encoding a costimulatory domain. In one embodiment, the costimulatory domain is a functional signaling domain of a protein, e.g., described herein, e.g., selected from the group consisting of MHC class I molecule, TNF receptor proteins, Immunoglobulin-like proteins, cytokine receptors, integrins, signaling lymphocytic activation molecules (SLAM proteins), activating NK cell receptors, BTLA, a Toll ligand receptor, OX40, CD2, CD7, CD27, CD28, CD30, CD40, CDS, ICAM-1, LFA-1 (CD11a/CD18), 4-1BB (CD137), B7-H3, CDS, ICAM-1, ICOS (CD278), GITR, BAFFR, LIGHT, HVEM (LIGHTR), KIRDS2, SLAMF7, NKp80 (KLRF1), NKp44, NKp30, NKp46, CD19, CD4, CD8alpha, CD8beta, IL2R beta, IL2R gamma, IL7R alpha, ITGA4, VLA1, CD49a, ITGA4, IA4, CD49D, ITGA6, VLA-6, CD49f, ITGAD, CD11d, ITGAE, CD103, ITGAL, CD11a, LFA-1, ITGAM, CD11b, ITGAX, CD11c, ITGB1, CD29, ITGB2, CD18, LFA-1, ITGB7, NKG2D, NKG2C, TNFR2, TRANCE/RANKL, DNAM1 (CD226), SLAMF4 (CD244, 2B4), CD84, CD96 (Tactile), CEACAM1, CRTAM, Ly9 (CD229), CD160 (BY55), PSGL1, CD100 (SEMA4D), CD69, SLAMF6 (NTB-A, Ly108), SLAM (SLAMF1, CD150, IPO-3), BLAME (SLAMF8), SELPLG (CD162), LTBR, LAT, GADS, SLP-76, PAG/Cbp, CD19a, and a ligand that specifically binds with CD83. In one embodiment, the costimulatory domain comprises a sequence of SEQ ID NO:7. In one embodiment, the transmembrane domain is a transmembrane domain of a protein, e.g., described herein, e.g., selected from the group consisting of the alpha, beta or zeta chain of the T-cell receptor, CD28, CD3 epsilon, CD45, CD4, CDS, CD8, CD9, CD16, CD22, CD33, CD37, CD64, CD80, CD86, CD134, CD137 and CD154. In one embodiment, the transmembrane domain comprises a sequence of SEQ ID NO:6. In one embodiment, the intracellular signaling domain comprises a functional signaling domain of 4-1BB and a functional signaling domain of zeta. In one embodiment, the intracellular signaling domain comprises the sequence of SEQ ID NO: 7 and the sequence of SEQ ID NO: 9, wherein the sequences comprising the intracellular signaling domain are expressed in the same frame and as a single polypeptide chain. In one embodiment, the anti-BCMAbinding domain is connected to the transmembrane domain by a hinge region. In one embodiment, the hinge region comprises SEQ ID NO:2. In one embodiment, the hinge region comprises SEQ ID NO:3 or SEQ ID NO:4 or SEQ ID NO:5.

[0498] In another aspect, the invention pertains to an encoded CAR molecule comprising a leader sequence of SEQ ID NO: 1, a scFv domain having a sequence selected from the group consisting of SEQ ID NO: 39, SEQ ID NO: 40, SEQ ID NO: 41, SEQ ID NO: 42, SEQ ID NO: 43, SEQ ID NO: 44, SEQ ID NO: 45, SEQ ID NO: 46, SEQ ID NO: 47, SEQ ID NO: 48, SEQ ID NO: 49, SEQ ID NO: 50, SEQ ID NO: 51, SEQ ID NO: 52, SEQ ID NO: 53, SEQ ID NO: 129, SEQ ID NO: 130, SEQ ID NO: 131, SEQ ID NO: 132, SEQ ID NO: 133, SEQ ID NO: 134, SEQ ID NO: 135, SEQ ID NO: 136, SEQ ID NO: 137, SEQ ID NO: 138, SEQ ID NO: 139, SEQ ID NO: 140, SEQ ID NO: 141, SEQ ID NO: 142, SEQ ID NO: 143, SEQ ID NO:144, SEQ ID NO:145, SEQ ID NO:146, SEQ ID NO:147, SEQ ID NO:148 and SEQ ID NO:149, or a sequence with 95-99% identify thereof, a hinge region of SEQ ID NO:2 or SEQ ID NO:3 or SEQ ID NO:4 or SEQ ID NO:5, a transmembrane domain having a sequence of SEQ ID NO: 6, a 4-1BB costimulatory domain having a sequence of SEQ ID NO:7, or a CD27 costimulatory domain having a sequence of SEQ ID NO:8, or a CD28 costimulatory domain having a sequence of SEQ ID NO:1104 (or a sequence with 95-99% identity thereof) or a ICOS costimulatory domain having a sequence of SEQ ID NO: 1106 (or a sequence with 95-99% identity thereof), and a CD3 zeta stimulatory domain having a sequence of SEQ ID NO:9 or SEQ ID NO:10. In one embodiment, the encoded CAR molecule comprises a sequence selected from a group consisting of SEQ ID NO: 99, SEQ ID NO: 100, SEQ ID NO: 101, SEQ ID NO: 102, SEQ ID NO: 103, SEQ ID NO: 104, SEQ ID NO: 105, SEQ ID NO: 106, SEQ ID NO: 107, SEQ ID NO: 108, SEQ ID NO: 109, SEQ ID NO: 110, SEQ ID NO: 111, SEQ ID NO: 112, SEQ ID NO: 113, SEQ ID NO: 213, SEQ ID NO: 214, SEQ ID NO: 215, SEQ ID NO: 216, SEQ ID NO: 217, SEQ ID NO: 218, SEQ ID NO: 219, SEQ ID NO: 220, SEQ ID NO: 221, SEQ ID NO: 222, SEQ ID NO: 223, SEQ ID NO: 224, SEQ ID NO: 225, SEQ ID NO: 226, SEQ ID NO: 227, SEQ ID NO: 228, SEQ ID NO: 229, SEQ ID NO: 230, SEQ ID NO: 231, SEQ ID NO: 232, and SEQ ID NO: 233 or a sequence with 95-99% identify thereof.

[0499] The nucleic acid sequences coding for the desired molecules can be obtained using recombinant methods known in the art, such as, for example by screening libraries from cells expressing the gene, by deriving the gene from a vector known to include the same, or by isolating directly from cells and tissues containing the same, using standard techniques. Alternatively, the gene of interest can be produced synthetically, rather than cloned.

[0500] The present invention also provides vectors in which a DNA of the present invention is inserted. Vectors derived from retroviruses such as the lentivirus are suitable tools to achieve long-term gene transfer since they allow long-term, stable integration of a transgene and its propagation in daughter cells. Lentiviral vectors have the added advantage over vectors derived from onco-retroviruses such as murine leukemia viruses in that they can transduce non-proliferating cells, such as hepatocytes. They also have the added advantage of low immunogenicity. A retroviral vector may also be, e.g., a gammaretroviral vector. A gammaretroviral vector may include, e.g., a promoter, a packaging signal (ψ), a primer binding site (PBS), one or more (e.g., two) long terminal repeats (LTR), and a transgene of interest, e.g., a gene encoding a CAR. A gammaretroviral vector may lack viral structural gens such as gag, pol, and env. Exemplary gammaretroviral vectors include Murine Leukemia Virus (MLV), Spleen-Focus Forming Virus (SFFV), and Myeloproliferative Sarcoma Virus (MPSV), and vectors derived therefrom. Other gammaretroviral vectors are described, e.g., in Tobias Maetzig et al., “Gammaretroviral Vectors: Biology, Technology and Application” Viruses. 2011 June; 3(6): 677-713.

[0501] In another embodiment, the vector comprising the nucleic acid encoding the desired CAR of the invention is an adenoviral vector (A5/35). In another embodiment, the expression of nucleic acids encoding CARs can be accomplished using of transposons such as sleeping beauty, CRISPR, CAS9, and zinc finger nucleases. See below June et al. 2009 Nature Reviews Immunology 9.10: 704-716, is incorporated herein by reference.

[0502] In brief summary, the expression of natural or synthetic nucleic acids encoding CARs is typically achieved by operably linking a nucleic acid encoding the CAR polypeptide or portions thereof to a promoter, and incorporating the construct into an expression vector. The vectors can be suitable for replication and integration eukaryotes. Typical cloning vectors contain transcription and translation terminators, initiation sequences, and promoters useful for regulation of the expression of the desired nucleic acid sequence.

[0503] The expression constructs of the present invention may also be used for nucleic acid immunization and gene therapy, using standard gene delivery protocols. Methods for gene delivery are known in the art. See, e.g., U.S. Pat. Nos. 5,399,346, 5,580,859, 5,589,466, incorporated by reference herein in their entireties. In another embodiment, the invention provides a gene therapy vector.

[0504] The nucleic acid can be cloned into a number of types of vectors. For example, the nucleic acid can be cloned into a vector including, but not limited to a plasmid, a phagemid, a phage derivative, an animal virus, and a cosmid. Vectors of particular interest include expression vectors, replication vectors, probe generation vectors, and sequencing vectors.

[0505] Further, the expression vector may be provided to a cell in the form of a viral vector. Viral vector technology is well known in the art and is described, for example, in Sambrook et al., 2012, MOLECULAR CLONING: A LABORATORY MANUAL, volumes 1-4, Cold Spring Harbor Press, NY), and in other virology and molecular biology manuals. Viruses, which are useful as vectors include, but are not limited to, retroviruses, adenoviruses, adeno-associated viruses, herpes viruses, and lentiviruses. In general, a suitable vector contains an origin of replication functional in at least one organism, a promoter sequence, convenient restriction endonuclease sites, and one or more selectable markers, (e.g., WO 01/96584; WO 01/29058; and U.S. Pat. No. 6,326,193).

[0506] A number of viral based systems have been developed for gene transfer into mammalian cells. For example, retroviruses provide a convenient platform for gene delivery systems. A selected gene can be inserted into a vector and packaged in retroviral particles using techniques known in the art. The recombinant virus can then be isolated and delivered to cells of the subject either in vivo or ex vivo. A number of retroviral systems are known in the art. In some embodiments, adenovirus vectors are used. A number of adenovirus vectors are known in the art. In one embodiment, lentivirus vectors are used.

[0507] Additional promoter elements, e.g., enhancers, regulate the frequency of transcriptional initiation. Typically, these are located in the region 30-110 bp upstream of the start site, although a number of promoters have been shown to contain functional elements downstream of the start site as well. The spacing between promoter elements frequently is flexible, so that promoter function is preserved when elements are inverted or moved relative to one another. In the thymidine kinase (tk) promoter, the spacing between promoter elements can be increased to 50 bp apart before activity begins to decline. Depending on the promoter, it appears that individual elements can function either cooperatively or independently to activate transcription.

[0508] An example of a promoter that is capable of expressing a CAR transgene in a mammalian T cell is the EF1a promoter. The native EF1a promoter drives expression of the alpha subunit of the elongation factor-1 complex, which is responsible for the enzymatic delivery of aminoacyl tRNAs to the ribosome. The EF1a promoter has been extensively used in mammalian expression plasmids and has been shown to be effective in driving CAR expression from transgenes cloned into a lentiviral vector. See, e.g., Milone et al., Mol. Ther. 17(8): 1453-1464 (2009). In one aspect, the EF1a promoter comprises the sequence provided as SEQ ID NO:11.

[0509] Another example of a promoter is the immediate early cytomegalovirus (CMV) promoter sequence. This promoter sequence is a strong constitutive promoter sequence capable of driving high levels of expression of any polynucleotide sequence operatively linked thereto. However, other constitutive promoter sequences may also be used, including, but not limited to the simian virus 40 (SV40) early promoter, mouse mammary tumor virus (MMTV), human immunodeficiency virus (HIV) long terminal repeat (LTR) promoter, MoMuLV promoter, an avian leukemia virus promoter, an Epstein-Barr virus immediate early promoter, a Rous sarcoma virus promoter, as well as human gene promoters such as, but not limited to, the actin promoter, the myosin promoter, the elongation factor-1a promoter, the hemoglobin promoter, and the creatine kinase promoter. Further, the invention should not be limited to the use of constitutive promoters. Inducible promoters are also contemplated as part of the invention. The use of an inducible promoter provides a molecular switch capable of turning on expression of the polynucleotide sequence which it is operatively linked when such expression is desired, or turning off the expression when expression is not desired. Examples of inducible promoters include, but are not limited to a metallothionine promoter, a glucocorticoid promoter, a progesterone promoter, and a tetracycline promoter.

[0510] Another example of a promoter is the phosphoglycerate kinase (PGK) promoter. In embodiments, a truncated PGK promoter (e.g., a PGK promoter with one or more, e.g., 1, 2, 5, 10, 100, 200, 300, or 400, nucleotide deletions when compared to the wild-type PGK promoter sequence) may be desired. The nucleotide sequences of exemplary PGK promoters are provided below.

WT PGK Promoter
(SEQ ID NO: 1109)
ACCCCTCTCTCCAGCCACTAAGCCAGTTGCTCCCTCGGCTGACGGCTGCA
CGCGAGGCCTCCGAACGTCTTACGCCTTGTGGCGCGCCCGTCCTTGTCCC
GGGTGTGATGGCGGGGTGTGGGGCGGAGGGCGTGGCGGGGAAGGGCCGGC
GACGAGAGCCGCGCGGGACGACTCGTCGGCGATAACCGGTGTCGGGTAGC
GCCAGCCGCGCGACGGTAACGAGGGACCGCGACAGGCAGACGCTCCCATG
ATCACTCTGCACGCCGAAGGCAAATAGTGCAGGCCGTGCGGCGCTTGGCG
TTCCTTGGAAGGGCTGAATCCCCGCCTCGTCCTTCGCAGCGGCCCCCCGG
GTGTTCCCATCGCCGCTTCTAGGCCCACTGCGACGCTTGCCTGCACTTCT
TACACGCTCTGGGTCCCAGCCGCGGCGACGCAAAGGGCCTTGGTGCGGGT
CTCGTCGGCGCAGGGACGCGTTTGGGTCCCGACGGAACCTTTTCCGCGTT
GGGGTTGGGGCACCATAAGCT
Exemplary truncated PGK Promoters:
PGK100:
(SEQ ID NO: 1110)
ACCCCTCTCTCCAGCCACTAAGCCAGTTGCTCCCTCGGCTGACGGCTGCA
CGCGAGGCCTCCGAACGTCTTACGCCTTGTGGCGCGCCCGTCCTTGTCCC
GGGTGTGATGGCGGGGTG
PGK200:
(SEQ ID NO: 1111)
ACCCCTCTCTCCAGCCACTAAGCCAGTTGCTCCCTCGGCTGACGGCTGCA
CGCGAGGCCTCCGAACGTCTTACGCCTTGTGGCGCGCCCGTCCTTGTCCC
GGGTGTGATGGCGGGGTGTGGGGCGGAGGGCGTGGCGGGGAAGGGCCGGC
GACGAGAGCCGCGCGGGACGACTCGTCGGCGATAACCGGTGTCGGGTAGC
GCCAGCCGCGCGACGGTAACG
PGK300:
(SEQ ID NO: 1112)
ACCCCTCTCTCCAGCCACTAAGCCAGTTGCTCCCTCGGCTGACGGCTGCA
CGCGAGGCCTCCGAACGTCTTACGCCTTGTGGCGCGCCCGTCCTTGTCCC
GGGTGTGATGGCGGGGTGTGGGGCGGAGGGCGTGGCGGGGAAGGGCCGGC
GACGAGAGCCGCGCGGGACGACTCGTCGGCGATAACCGGTGTCGGGTAGC
GCCAGCCGCGCGACGGTAACGAGGGACCGCGACAGGCAGACGCTCCCATG
ATCACTCTGCACGCCGAAGGCAAATAGTGCAGGCCGTGCGGCGCTTGGCG
TTCCTTGGAAGGGCTGAATCCCCG
PGK400:
(SEQ ID NO: 1113)
ACCCCTCTCTCCAGCCACTAAGCCAGTTGCTCCCTCGGCTGACGGCTGCA
CGCGAGGCCTCCGAACGTCTTACGCCTTGTGGCGCGCCCGTCCTTGTCCC
GGGTGTGATGGCGGGGTGTGGGGCGGAGGGCGTGGCGGGGAAGGGCCGGC
GACGAGAGCCGCGCGGGACGACTCGTCGGCGATAACCGGTGTCGGGTAGC
GCCAGCCGCGCGACGGTAACGAGGGACCGCGACAGGCAGACGCTCCCATG
ATCACTCTGCACGCCGAAGGCAAATAGTGCAGGCCGTGCGGCGCTTGGCG
TTCCTTGGAAGGGCTGAATCCCCGCCTCGTCCTTCGCAGCGGCCCCCCGG
GTGTTCCCATCGCCGCTTCTAGGCCCACTGCGACGCTTGCCTGCACTTCT
TACACGCTCTGGGTCCCAGCCG

[0511] A vector may also include, e.g., a signal sequence to facilitate secretion, a polyadenylation signal and transcription terminator (e.g., from Bovine Growth Hormone (BGH) gene), an element allowing episomal replication and replication in prokaryotes (e.g. SV40 origin and ColE1 or others known in the art) and/or elements to allow selection (e.g., ampicillin resistance gene and/or zeocin marker).

[0512] In order to assess the expression of a CAR polypeptide or portions thereof, the expression vector to be introduced into a cell can also contain either a selectable marker gene or a reporter gene or both to facilitate identification and selection of expressing cells from the population of cells sought to be transfected or infected through viral vectors. In other aspects, the selectable marker may be carried on a separate piece of DNA and used in a co-transfection procedure. Both selectable markers and reporter genes may be flanked with appropriate regulatory sequences to enable expression in the host cells. Useful selectable markers include, for example, antibiotic-resistance genes, such as neo and the like.

[0513] Reporter genes are used for identifying potentially transfected cells and for evaluating the functionality of regulatory sequences. In general, a reporter gene is a gene that is not present in or expressed by the recipient organism or tissue and that encodes a polypeptide whose expression is manifested by some easily detectable property, e.g., enzymatic activity. Expression of the reporter gene is assayed at a suitable time after the DNA has been introduced into the recipient cells. Suitable reporter genes may include genes encoding luciferase, beta-galactosidase, chloramphenicol acetyl transferase, secreted alkaline phosphatase, or the green fluorescent protein gene (e.g., Ui-Tei et al., 2000 FEBS Letters 479: 79-82). Suitable expression systems are well known and may be prepared using known techniques or obtained commercially. In general, the construct with the minimal 5′ flanking region showing the highest level of expression of reporter gene is identified as the promoter. Such promoter regions may be linked to a reporter gene and used to evaluate agents for the ability to modulate promoter-driven transcription.

[0514] In one embodiment, the vector can further comprise a nucleic acid encoding a second CAR. In one embodiment, the second CAR includes an antigen binding domain to a target expressed on acute myeloid leukemia cells, such as, e.g., CD123, CD34, CLL-1, folate receptor beta, or FLT3; or a target expressed on a B cell, e.g., CD10, CD19, CD20, CD22, CD34, CD123, FLT-3, ROR1, CD79b, CD179b, or CD79a. In one embodiment, the vector comprises a nucleic acid sequence encoding a first CAR that specifically binds a first antigen and includes an intracellular signaling domain having a costimulatory signaling domain but not a primary signaling domain, and a nucleic acid encoding a second CAR that specifically binds a second, different, antigen and includes an intracellular signaling domain having a primary signaling domain but not a costimulatory signaling domain. In one embodiment, the vector comprises a nucleic acid encoding a first BCMA CAR that includes a BCMA binding domain, a transmembrane domain and a costimulatory domain and a nucleic acid encoding a second CAR that targets an antigen other than BCMA (e.g., an antigen expressed on AML cells, e.g., CD123, CD34, CLL-1, folate receptor beta, or FLT3; or an antigen expressed on a B cell, e.g., CD10, CD19, CD20, CD22, CD34, CD123, FLT-3, ROR1, CD79b, CD179b, or CD79a) and includes an antigen binding domain, a transmembrane domain and a primary signaling domain. In another embodiment, the vector comprises a nucleic acid encoding a first BCMA CAR that includes a BCMA binding domain, a transmembrane domain and a primary signaling domain and a nucleic acid encoding a second CAR that specifically binds an antigen other than BCMA (e.g., an antigen expressed on AML cells, e.g., CD123, CD34, CLL-1, folate receptor beta, or FLT3; or an antigen expressed on a B cell, e.g., CD10, CD19, CD20, CD22, CD34, CD123, FLT-3, ROR1, CD79b, CD179b, or CD79a) and includes an antigen binding domain to the antigen, a transmembrane domain and a costimulatory signaling domain.

[0515] In one embodiment, the vector comprises a nucleic acid encoding a BCMA CAR described herein and a nucleic acid encoding an inhibitory CAR. In one embodiment, the inhibitory CAR comprises an antigen binding domain that binds an antigen found on normal cells but not cancer cells, e.g., normal cells that also express BCMA. In one embodiment, the inhibitory CAR comprises the antigen binding domain, a transmembrane domain and an intracellular domain of an inhibitory molecule. For example, the intracellular domain of the inhibitory CAR can be an intracellular domain of PD1, PD-L1, PD-L2, CTLA4, TIM3, CEACAM (e.g., CEACAM-1, CEACAM-3 and/or CEACAM-5), LAG3, VISTA, BTLA, TIGIT, LAIR1, CD160, 2B4, CD80, CD86, B7-H3 (CD276), B7-H4 (VTCN1), HVEM (TNFRSF14 or CD270), KIR, A2aR, MHC class I, MHC class II, GAL9, adenosine, and TGFR beta.

[0516] In embodiments, the vector may comprise two or more nucleic acid sequences encoding a CAR, e.g., a BCMA CAR described herein and a second CAR, e.g., an inhibitory CAR or a CAR that specifically binds to an antigen other than BCMA (e.g., an antigen expressed on AML cells, e.g., CD123, CLL-1, CD34, FLT3, or folate receptor beta; or antigen expresson B cells, e.g., CD10, CD19, CD20, CD22, CD34, CD123, FLT-3, ROR1, CD79b, CD179b, or CD79a). In such embodiments, the two or more nucleic acid sequences encoding the CAR are encoded by a single nucleic molecule in the same frame and as a single polypeptide chain. In this aspect, the two or more CARs, can, e.g., be separated by one or more peptide cleavage sites. (e.g., an auto-cleavage site or a substrate for an intracellular protease). Examples of peptide cleavage sites include the following, wherein the GSG residues are optional:

T2A:
(SEQ ID NO: 1114)
(GSG) E G R G S L L T C G D V E E N P G P
P2A:
(SEQ ID NO: 1115)
(GSG) A T N F S L L K Q A G D V E E N P G P
E2A:
(SEQ ID NO: 1116)
(GSG) Q C T N Y A L L K L A G D V E S N P G P
F2A:
(SEQ ID NO: 1117)
(GSG) V K Q T L N F D L L K L A G D V E S N P G P

[0517] Methods of introducing and expressing genes into a cell are known in the art. In the context of an expression vector, the vector can be readily introduced into a host cell, e.g., mammalian, bacterial, yeast, or insect cell by any method in the art. For example, the expression vector can be transferred into a host cell by physical, chemical, or biological means.

[0518] Physical methods for introducing a polynucleotide into a host cell include calcium phosphate precipitation, lipofection, particle bombardment, microinjection, electroporation, and the like. Methods for producing cells comprising vectors and/or exogenous nucleic acids are well-known in the art. See, for example, Sambrook et al., 2012, MOLECULAR CLONING: A LABORATORY MANUAL, volumes 1-4, Cold Spring Harbor Press, NY). A preferred method for the introduction of a polynucleotide into a host cell is calcium phosphate transfection

[0519] Biological methods for introducing a polynucleotide of interest into a host cell include the use of DNA and RNA vectors. Viral vectors, and especially retroviral vectors, have become the most widely used method for inserting genes into mammalian, e.g., human cells. Other viral vectors can be derived from lentivirus, poxviruses, herpes simplex virus I, adenoviruses and adeno-associated viruses, and the like. See, for example, U.S. Pat. Nos. 5,350,674 and 5,585,362.

[0520] Chemical means for introducing a polynucleotide into a host cell include colloidal dispersion systems, such as macromolecule complexes, nanocapsules, microspheres, beads, and lipid-based systems including oil-in-water emulsions, micelles, mixed micelles, and liposomes. An exemplary colloidal system for use as a delivery vehicle in vitro and in vivo is a liposome (e.g., an artificial membrane vesicle). Other methods of state-of-the-art targeted delivery of nucleic acids are available, such as delivery of polynucleotides with targeted nanoparticles or other suitable sub-micron sized delivery system.

[0521] In the case where a non-viral delivery system is utilized, an exemplary delivery vehicle is a liposome. The use of lipid formulations is contemplated for the introduction of the nucleic acids into a host cell (in vitro, ex vivo or in vivo). In another aspect, the nucleic acid may be associated with a lipid. The nucleic acid associated with a lipid may be encapsulated in the aqueous interior of a liposome, interspersed within the lipid bilayer of a liposome, attached to a liposome via a linking molecule that is associated with both the liposome and the oligonucleotide, entrapped in a liposome, complexed with a liposome, dispersed in a solution containing a lipid, mixed with a lipid, combined with a lipid, contained as a suspension in a lipid, contained or complexed with a micelle, or otherwise associated with a lipid. Lipid, lipid/DNA or lipid/expression vector associated compositions are not limited to any particular structure in solution. For example, they may be present in a bilayer structure, as micelles, or with a “collapsed” structure. They may also simply be interspersed in a solution, possibly forming aggregates that are not uniform in size or shape. Lipids are fatty substances which may be naturally occurring or synthetic lipids. For example, lipids include the fatty droplets that naturally occur in the cytoplasm as well as the class of compounds which contain long-chain aliphatic hydrocarbons and their derivatives, such as fatty acids, alcohols, amines, amino alcohols, and aldehydes.

[0522] Lipids suitable for use can be obtained from commercial sources. For example, dimyristyl phosphatidylcholine (“DMPC”) can be obtained from Sigma, St. Louis, Mo.; dicetyl phosphate (“DCP”) can be obtained from K & K Laboratories (Plainview, N.Y.); cholesterol (“Choi”) can be obtained from Calbiochem-Behring; dimyristyl phosphatidylglycerol (“DMPG”) and other lipids may be obtained from Avanti Polar Lipids, Inc. (Birmingham, Ala.). Stock solutions of lipids in chloroform or chloroform/methanol can be stored at about −20° C. Chloroform is used as the only solvent since it is more readily evaporated than methanol. “Liposome” is a generic term encompassing a variety of single and multilamellar lipid vehicles formed by the generation of enclosed lipid bilayers or aggregates. Liposomes can be characterized as having vesicular structures with a phospholipid bilayer membrane and an inner aqueous medium. Multilamellar liposomes have multiple lipid layers separated by aqueous medium. They form spontaneously when phospholipids are suspended in an excess of aqueous solution. The lipid components undergo self-rearrangement before the formation of closed structures and entrap water and dissolved solutes between the lipid bilayers (Ghosh et al., 1991 Glycobiology 5: 505-10). However, compositions that have different structures in solution than the normal vesicular structure are also encompassed. For example, the lipids may assume a micellar structure or merely exist as nonuniform aggregates of lipid molecules. Also contemplated are lipofectamine-nucleic acid complexes.

[0523] Regardless of the method used to introduce exogenous nucleic acids into a host cell or otherwise expose a cell to the inhibitor of the present invention, in order to confirm the presence of the recombinant DNA sequence in the host cell, a variety of assays may be performed. Such assays include, for example, “molecular biological” assays well known to those of skill in the art, such as Southern and Northern blotting, RT-PCR and PCR; “biochemical” assays, such as detecting the presence or absence of a particular peptide, e.g., by immunological means (ELISAs and Western blots) or by assays described herein to identify agents falling within the scope of the invention.

[0524] The present invention further provides a vector comprising a CAR encoding nucleic acid molecule. In one aspect, a CAR vector can be directly transduced into a cell, e.g., a T cell or NK cell. In one aspect, the vector is a cloning or expression vector, e.g., a vector including, but not limited to, one or more plasmids (e.g., expression plasmids, cloning vectors, minicircles, minivectors, double minute chromosomes), retroviral and lentiviral vector constructs. In one aspect, the vector is capable of expressing the CAR construct in mammalian T cells or NK cells. In one aspect, the mammalian T cell is a human T cell. In one aspect, the mammalian NK cell is a human NK cell.

### Sources of Cells

[0525] Prior to expansion and genetic modification, a source of cells, e.g., immune effector cells (e.g., T cells or NK cells), is obtained from a subject. The term “subject” is intended to include living organisms in which an immune response can be elicited (e.g., mammals). Examples of subjects include humans, dogs, cats, mice, rats, and transgenic species thereof. T cells can be obtained from a number of sources, including peripheral blood mononuclear cells, bone marrow, lymph node tissue, cord blood, thymus tissue, tissue from a site of infection, ascites, pleural effusion, spleen tissue, and tumors.

[0526] In certain aspects of the present invention, any number of immune effector cell (e.g., T cell or NK cell) lines available in the art, may be used. In certain aspects of the present invention, T cells can be obtained from a unit of blood collected from a subject using any number of techniques known to the skilled artisan, such as Ficoll™ separation. In one preferred aspect, cells from the circulating blood of an individual are obtained by apheresis. The apheresis product typically contains lymphocytes, including T cells, monocytes, granulocytes, B cells, other nucleated white blood cells, red blood cells, and platelets. In one aspect, the cells collected by apheresis may be washed to remove the plasma fraction and to place the cells in an appropriate buffer or media for subsequent processing steps. In one aspect of the invention, the cells are washed with phosphate buffered saline (PBS). In an alternative aspect, the wash solution lacks calcium and may lack magnesium or may lack many if not all divalent cations.

[0527] Initial activation steps in the absence of calcium can lead to magnified activation. As those of ordinary skill in the art would readily appreciate a washing step may be accomplished by methods known to those in the art, such as by using a semi-automated “flow-through” centrifuge (for example, the Cobe 2991 cell processor, the Baxter CytoMate, or the Haemonetics Cell Saver 5) according to the manufacturer's instructions. After washing, the cells may be resuspended in a variety of biocompatible buffers, such as, for example, Ca-free, Mg-free PBS, PlasmaLyte A, or other saline solution with or without buffer. Alternatively, the undesirable components of the apheresis sample may be removed and the cells directly resuspended in culture media.

[0528] It is recognized that the methods of the application can utilize culture media conditions comprising 5% or less, for example 2%, human AB serum, and employ known culture media conditions and compositions, for example those described in Smith et al., “Ex vivo expansion of human T cells for adoptive immunotherapy using the novel Xeno-free CTS Immune Cell Serum Replacement” Clinical & Translational Immunology (2015) 4, e31; doi:10.1038/cti.2014.31.

[0529] In one aspect, T cells are isolated from peripheral blood lymphocytes by lysing the red blood cells and depleting the monocytes, for example, by centrifugation through a PERCOLL™ gradient or by counterflow centrifugal elutriation. A specific subpopulation of T cells, such as CD3+, CD28+, CD4+, CD8+, CD45RA+, and CD45RO+ T cells, can be further isolated by positive or negative selection techniques. For example, in one aspect, T cells are isolated by incubation with anti-CD3/anti-CD28 (e.g., 3×28)-conjugated beads, such as DYNABEADS® M-450 CD3/CD28 T, for a time period sufficient for positive selection of the desired T cells. In one aspect, the time period is about 30 minutes. In a further aspect, the time period ranges from 30 minutes to 36 hours or longer and all integer values there between. In a further aspect, the time period is at least 1, 2, 3, 4, 5, or 6 hours. In yet another preferred aspect, the time period is 10 to 24 hours. In one aspect, the incubation time period is 24 hours. Longer incubation times may be used to isolate T cells in any situation where there are few T cells as compared to other cell types, such in isolating tumor infiltrating lymphocytes (TIL) from tumor tissue or from immunocompromised individuals. Further, use of longer incubation times can increase the efficiency of capture of CD8+ T cells. Thus, by simply shortening or lengthening the time T cells are allowed to bind to the CD3/CD28 beads and/or by increasing or decreasing the ratio of beads to T cells (as described further herein), subpopulations of T cells can be preferentially selected for or against at culture initiation or at other time points during the process. Additionally, by increasing or decreasing the ratio of anti-CD3 and/or anti-CD28 antibodies on the beads or other surface, subpopulations of T cells can be preferentially selected for or against at culture initiation or at other desired time points. The skilled artisan would recognize that multiple rounds of selection can also be used in the context of this invention. In certain aspects, it may be desirable to perform the selection procedure and use the “unselected” cells in the activation and expansion process. “Unselected” cells can also be subjected to further rounds of selection.

[0530] Enrichment of a T cell population by negative selection can be accomplished with a combination of antibodies directed to surface markers unique to the negatively selected cells. One method is cell sorting and/or selection via negative magnetic immunoadherence or flow cytometry that uses a cocktail of monoclonal antibodies directed to cell surface markers present on the cells negatively selected. For example, to enrich for CD4+ cells by negative selection, a monoclonal antibody cocktail typically includes antibodies to CD14, CD20, CD11b, CD16, HLA-DR, and CD8. In certain aspects, it may be desirable to enrich for or positively select for regulatory T cells which typically express CD4+, CD25+, CD62Lhi, GITR+, and FoxP3+. Alternatively, in certain aspects, T regulatory cells are depleted by anti-C25 conjugated beads or other similar method of selection.

[0531] The methods described herein can include, e.g., selection of a specific subpopulation of immune effector cells, e.g., T cells, that are a T regulatory cell-depleted population, CD25+ depleted cells, using, e.g., a negative selection technique, e.g., described herein. Preferably, the population of T regulatory depleted cells contains less than 30%, 25%, 20%, 15%, 10%, 5%, 4%, 3%, 2%, 1% of CD25+ cells.

[0532] In one embodiment, T regulatory cells, e.g., CD25+ T cells, are removed from the population using an anti-CD25 antibody, or fragment thereof, or a CD25-binding ligand, IL-2. In one embodiment, the anti-CD25 antibody, or fragment thereof, or CD25-binding ligand is conjugated to a substrate, e.g., a bead, or is otherwise coated on a substrate, e.g., a bead. In one embodiment, the anti-CD25 antibody, or fragment thereof, is conjugated to a substrate as described herein.

[0533] In one embodiment, the T regulatory cells, e.g., CD25+ T cells, are removed from the population using CD25 depletion reagent from Miltenyi™. In one embodiment, the ratio of cells to CD25 depletion reagent is 1e7 cells to 20 uL, or 1e7 cells to 15 uL, or 1e7 cells to 10 uL, or 1e7 cells to 5 uL, or 1e7 cells to 2.5 uL, or 1e7 cells to 1.25 uL. In one embodiment, e.g., for T regulatory cells, e.g., CD25+ depletion, greater than 500 million cells/ml is used. In a further aspect, a concentration of cells of 600, 700, 800, or 900 million cells/ml is used.

[0534] In one embodiment, the population of immune effector cells to be depleted includes about 6×10⁹ CD25+ T cells. In other aspects, the population of immune effector cells to be depleted include about 1×10⁹ to 1×10¹⁰ CD25+ T cell, and any integer value in between. In one embodiment, the resulting population T regulatory depleted cells has 2×10⁹ T regulatory cells, e.g., CD25+ cells, or less (e.g., 1×10⁹, 5×10⁸, 1×10⁸, 5×10⁷, 1×10⁷, or less CD25+ cells).

[0535] In one embodiment, the T regulatory cells, e.g., CD25+ cells, are removed from the population using the CliniMAC system with a depletion tubing set, such as, e.g., tubing 162-01. In one embodiment, the CliniMAC system is run on a depletion setting such as, e.g., DEPLETION2.1.

[0536] Without wishing to be bound by a particular theory, decreasing the level of negative regulators of immune cells (e.g., decreasing the number of unwanted immune cells, e.g., T_{REG} cells), in a subject prior to apheresis or during manufacturing of a CAR-expressing cell product can reduce the risk of subject relapse. For example, methods of depleting T_{REG} cells are known in the art. Methods of decreasing T_{REG} cells include, but are not limited to, cyclophosphamide, anti-GITR antibody (an anti-GITR antibody described herein), CD25-depletion, and combinations thereof.

[0537] In some embodiments, the manufacturing methods comprise reducing the number of (e.g., depleting) T_{REG} cells prior to manufacturing of the CAR-expressing cell. For example, manufacturing methods comprise contacting the sample, e.g., the apheresis sample, with an anti-GITR antibody and/or an anti-CD25 antibody (or fragment thereof, or a CD25-binding ligand), e.g., to deplete T_{REG} cells prior to manufacturing of the CAR-expressing cell (e.g., T cell, NK cell) product.

[0538] In an embodiment, a subject is pre-treated with one or more therapies that reduce T_{REG} cells prior to collection of cells for CAR-expressing cell product manufacturing, thereby reducing the risk of subject relapse to CAR-expressing cell treatment. In an embodiment, methods of decreasing T_{REG} cells include, but are not limited to, administration to the subject of one or more of cyclophosphamide, anti-GITR antibody, CD25-depletion, or a combination thereof. Administration of one or more of cyclophosphamide, anti-GITR antibody, CD25-depletion, or a combination thereof, can occur before, during or after an infusion of the CAR-expressing cell product.

[0539] In an embodiment, a subject is pre-treated with cyclophosphamide prior to collection of cells for CAR-expressing cell product manufacturing, thereby reducing the risk of subject relapse to CAR-expressing cell treatment. In an embodiment, a subject is pre-treated with an anti-GITR antibody prior to collection of cells for CAR-expressing cell product manufacturing, thereby reducing the risk of subject relapse to CAR-expressing cell treatment.

[0540] In one embodiment, the population of cells to be removed are neither the regulatory T cells or tumor cells, but cells that otherwise negatively affect the expansion and/or function of CART cells, e.g. cells expressing CD14, CD11b, CD33, CD15, or other markers expressed by potentially immune suppressive cells. In one embodiment, such cells are envisioned to be removed concurrently with regulatory T cells and/or tumor cells, or following said depletion, or in another order.

[0541] The methods described herein can include more than one selection step, e.g., more than one depletion step. Enrichment of a T cell population by negative selection can be accomplished, e.g., with a combination of antibodies directed to surface markers unique to the negatively selected cells. One method is cell sorting and/or selection via negative magnetic immunoadherence or flow cytometry that uses a cocktail of monoclonal antibodies directed to cell surface markers present on the cells negatively selected. For example, to enrich for CD4+ cells by negative selection, a monoclonal antibody cocktail can include antibodies to CD14, CD20, CD11b, CD16, HLA-DR, and CD8.

[0542] The methods described herein can further include removing cells from the population which express a tumor antigen, e.g., a tumor antigen that does not comprise CD25, e.g., CD19, CD30, CD38, CD123, CD20, CD14 or CD11b, to thereby provide a population of T regulatory depleted, e.g., CD25+ depleted, and tumor antigen depleted cells that are suitable for expression of a CAR, e.g., a CAR described herein. In one embodiment, tumor antigen expressing cells are removed simultaneously with the T regulatory, e.g., CD25+ cells. For example, an anti-CD25 antibody, or fragment thereof, and an anti-tumor antigen antibody, or fragment thereof, can be attached to the same substrate, e.g., bead, which can be used to remove the cells or an anti-CD25 antibody, or fragment thereof, or the anti-tumor antigen antibody, or fragment thereof, can be attached to separate beads, a mixture of which can be used to remove the cells. In other embodiments, the removal of T regulatory cells, e.g., CD25+ cells, and the removal of the tumor antigen expressing cells is sequential, and can occur, e.g., in either order.

[0543] Also provided are methods that include removing cells from the population which express a check point inhibitor, e.g., a check point inhibitor described herein, e.g., one or more of PD1+ cells, LAG3+ cells, and TIM3+ cells, to thereby provide a population of T regulatory depleted, e.g., CD25+ depleted cells, and check point inhibitor depleted cells, e.g., PD1+, LAG3+ and/or TIM3+ depleted cells. Exemplary check point inhibitors include PD1, PD-L1, PD-L2, CTLA4, TIM3, CEACAM (e.g., CEACAM-1, CEACAM-3 and/or CEACAM-5), LAG3, VISTA, BTLA, TIGIT, LAIR1, CD160, 2B4, CD80, CD86, B7-H3 (CD276), B7-H4 (VTCN1), HVEM (TNFRSF14 or CD270), KIR, A2aR, MHC class I, MHC class II, GAL9, adenosine, and TGFR beta. In embodiments, the checkpoint inhibitor is PD1 or PD-L1. In one embodiment, check point inhibitor expressing cells are removed simultaneously with the T regulatory, e.g., CD25+ cells. For example, an anti-CD25 antibody, or fragment thereof, and an anti-check point inhibitor antibody, or fragment thereof, can be attached to the same bead which can be used to remove the cells, or an anti-CD25 antibody, or fragment thereof, and the anti-check point inhibitor antibody, or fragment there, can be attached to separate beads, a mixture of which can be used to remove the cells. In other embodiments, the removal of T regulatory cells, e.g., CD25+ cells, and the removal of the check point inhibitor expressing cells is sequential, and can occur, e.g., in either order.

[0544] In one embodiment, a T cell population can be selected that expresses one or more of IFN-γ, TNFα, IL-17A, IL-2, IL-3, IL-4, GM-CSF, IL-10, IL-13, granzyme B, and perforin, or other appropriate molecules, e.g., other cytokines. Methods for screening for cell expression can be determined, e.g., by the methods described in PCT Publication No.: WO 2013/126712.

[0545] For isolation of a desired population of cells by positive or negative selection, the concentration of cells and surface (e.g., particles such as beads) can be varied. In certain aspects, it may be desirable to significantly decrease the volume in which beads and cells are mixed together (e.g., increase the concentration of cells), to ensure maximum contact of cells and beads. For example, in one aspect, a concentration of 2 billion cells/ml is used. In one aspect, a concentration of 1 billion cells/ml is used. In a further aspect, greater than 100 million cells/ml is used. In a further aspect, a concentration of cells of 10, 15, 20, 25, 30, 35, 40, 45, or 50 million cells/ml is used. In yet one aspect, a concentration of cells from 75, 80, 85, 90, 95, or 100 million cells/ml is used. In further aspects, concentrations of 125 or 150 million cells/ml can be used. Using high concentrations can result in increased cell yield, cell activation, and cell expansion. Further, use of high cell concentrations allows more efficient capture of cells that may weakly express target antigens of interest, such as CD28-negative T cells, or from samples where there are many tumor cells present (e.g., leukemic blood, tumor tissue, etc.). Such populations of cells may have therapeutic value and would be desirable to obtain. For example, using high concentration of cells allows more efficient selection of CD8+ T cells that normally have weaker CD28 expression.

[0546] In a related aspect, it may be desirable to use lower concentrations of cells. By significantly diluting the mixture of T cells and surface (e.g., particles such as beads), interactions between the particles and cells is minimized. This selects for cells that express high amounts of desired antigens to be bound to the particles. For example, CD4+ T cells express higher levels of CD28 and are more efficiently captured than CD8+ T cells in dilute concentrations. In one aspect, the concentration of cells used is 5×10e6/ml. In other aspects, the concentration used can be from about 1×10⁵/ml to 1×10⁶/ml, and any integer value in between.

[0547] In other aspects, the cells may be incubated on a rotator for varying lengths of time at varying speeds at either 2-10° C. or at room temperature.

[0548] T cells for stimulation can also be frozen after a washing step. Wishing not to be bound by theory, the freeze and subsequent thaw step provides a more uniform product by removing granulocytes and to some extent monocytes in the cell population. After the washing step that removes plasma and platelets, the cells may be suspended in a freezing solution. While many freezing solutions and parameters are known in the art and will be useful in this context, one method involves using PBS containing 20% DMSO and 8% human serum albumin, or culture media containing 10% Dextran 40 and 5% Dextrose, 20% Human Serum Albumin and 7.5% DMSO, or 31.25% Plasmalyte-A, 31.25% Dextrose 5%, 0.45% NaCl, 10% Dextran 40 and 5% Dextrose, 20% Human Serum Albumin, and 7.5% DMSO or other suitable cell freezing media containing for example, Hespan and PlasmaLyte A, the cells then are frozen to −80° C. at a rate of 1° per minute and stored in the vapor phase of a liquid nitrogen storage tank. Other methods of controlled freezing may be used as well as uncontrolled freezing immediately at −20° C. or in liquid nitrogen.

[0549] In certain aspects, cryopreserved cells are thawed and washed as described herein and allowed to rest for one hour at room temperature prior to activation using the methods of the present invention.

[0550] Also contemplated in the context of the invention is the collection of blood samples or apheresis product from a subject at a time period prior to when the expanded cells as described herein might be needed. As such, the source of the cells to be expanded can be collected at any time point necessary, and desired cells, such as immune effector cells, e.g., T cells or NK cells, isolated and frozen for later use in cell therapy, e.g., T cell therapy, for any number of diseases or conditions that would benefit from cell therapy, e.g., T cell therapy, such as those described herein. In one aspect a blood sample or an apheresis is taken from a generally healthy subject. In certain aspects, a blood sample or an apheresis is taken from a generally healthy subject who is at risk of developing a disease, but who has not yet developed a disease, and the cells of interest are isolated and frozen for later use. In certain aspects, the immune effector cells (e.g., T cells or NK cells) may be expanded, frozen, and used at a later time. In certain aspects, samples are collected from a patient shortly after diagnosis of a particular disease as described herein but prior to any treatments. In a further aspect, the cells are isolated from a blood sample or an apheresis from a subject prior to any number of relevant treatment modalities, including but not limited to treatment with agents such as natalizumab, efalizumab, antiviral agents, chemotherapy, radiation, immunosuppressive agents, such as cyclosporin, azathioprine, methotrexate, mycophenolate, and FK506, antibodies, or other immunoablative agents such as CAMPATH, anti-CD3 antibodies, cytoxan, fludarabine, cyclosporin, FK506, rapamycin, mycophenolic acid, steroids, FR901228, and irradiation.

[0551] In a further aspect of the present invention, T cells are obtained from a patient directly following treatment that leaves the subject with functional T cells. In this regard, it has been observed that following certain cancer treatments, in particular treatments with drugs that damage the immune system, shortly after treatment during the period when patients would normally be recovering from the treatment, the quality of T cells obtained may be optimal or improved for their ability to expand ex vivo. Likewise, following ex vivo manipulation using the methods described herein, these cells may be in a preferred state for enhanced engraftment and in vivo expansion. Thus, it is contemplated within the context of the present invention to collect blood cells, including T cells, dendritic cells, or other cells of the hematopoietic lineage, during this recovery phase. Further, in certain aspects, mobilization (for example, mobilization with GM-CSF) and conditioning regimens can be used to create a condition in a subject wherein repopulation, recirculation, regeneration, and/or expansion of particular cell types is favored, especially during a defined window of time following therapy. Illustrative cell types include T cells, B cells, dendritic cells, and other cells of the immune system.

[0552] In one embodiment, the immune effector cells expressing a CAR molecule, e.g., a CAR molecule described herein, are obtained from a subject that has received a low, immune enhancing dose of an mTOR inhibitor. In an embodiment, the population of immune effector cells, e.g., T cells, to be engineered to express a CAR, are harvested after a sufficient time, or after sufficient dosing of the low, immune enhancing, dose of an mTOR inhibitor, such that the level of PD1 negative immune effector cells, e.g., T cells, or the ratio of PD1 negative immune effector cells, e.g., T cells/PD1 positive immune effector cells, e.g., T cells, in the subject or harvested from the subject has been, at least transiently, increased.

[0553] In other embodiments, population of immune effector cells, e.g., T cells, which have, or will be engineered to express a CAR, can be treated ex vivo by contact with an amount of an mTOR inhibitor that increases the number of PD1 negative immune effector cells, e.g., T cells or increases the ratio of PD1 negative immune effector cells, e.g., T cells/PD1 positive immune effector cells, e.g., T cells.

[0554] In one embodiment, a T cell population is diaglycerol kinase (DGK)-deficient. DGK-deficient cells include cells that do not express DGK RNA or protein, or have reduced or inhibited DGK activity. DGK-deficient cells can be generated by genetic approaches, e.g., administering RNA-interfering agents, e.g., siRNA, shRNA, miRNA, to reduce or prevent DGK expression. Alternatively, DGK-deficient cells can be generated by treatment with DGK inhibitors described herein.

[0555] In one embodiment, a T cell population is Ikaros-deficient. Ikaros-deficient cells include cells that do not express Ikaros RNA or protein, or have reduced or inhibited Ikaros activity, Ikaros-deficient cells can be generated by genetic approaches, e.g., administering RNA-interfering agents, e.g., siRNA, shRNA, miRNA, to reduce or prevent Ikaros expression. Alternatively, Ikaros-deficient cells can be generated by treatment with Ikaros inhibitors, e.g., lenalidomide.

[0556] In embodiments, a T cell population is DGK-deficient and Ikaros-deficient, e.g., does not express DGK and Ikaros, or has reduced or inhibited DGK and Ikaros activity. Such DGK and Ikaros-deficient cells can be generated by any of the methods described herein.

[0557] In an embodiment, the NK cells are obtained from the subject. In another embodiment, the NK cells are an NK cell line, e.g., NK-92 cell line (Conkwest).

[0558] Allogeneic CAR

[0559] In embodiments described herein, the immune effector cell can be an allogeneic immune effector cell, e.g., T cell or NK cell. For example, the cell can be an allogeneic T cell, e.g., an allogeneic T cell lacking expression of a functional T cell receptor (TCR) and/or human leukocyte antigen (HLA), e.g., HLA class I and/or HLA class II.

[0560] A T cell lacking a functional TCR can be, e.g., engineered such that it does not express any functional TCR on its surface, engineered such that it does not express one or more subunits that comprise a functional TCR (e.g., engineered such that it does not express (or exhibits reduced expression) of TCR alpha, TCR beta, TCR gamma, TCR delta, TCR epsilon, and/or TCR zeta) or engineered such that it produces very little functional TCR on its surface. Alternatively, the T cell can express a substantially impaired TCR, e.g., by expression of mutated or truncated forms of one or more of the subunits of the TCR. The term “substantially impaired TCR” means that this TCR will not elicit an adverse immune reaction in a host.

[0561] A T cell described herein can be, e.g., engineered such that it does not express a functional HLA on its surface. For example, a T cell described herein, can be engineered such that cell surface expression HLA, e.g., HLA class 1 and/or HLA class II, is downregulated. In some aspects, downregulation of HLA may be accomplished by reducing or eliminating expression of beta-2 microglobulin (B2M). In some embodiments, the T cell can lack a functional TCR and a functional HLA, e.g., HLA class I and/or HLA class II.

[0562] Modified T cells that lack expression of a functional TCR and/or HLA can be obtained by any suitable means, including a knock out or knock down of one or more subunit of TCR or HLA. For example, the T cell can include a knock down of TCR and/or HLA using siRNA, shRNA, clustered regularly interspaced short palindromic repeats (CRISPR) transcription-activator like effector nuclease (TALEN), or zinc finger endonuclease (ZFN).

[0563] In some embodiments, the allogeneic cell can be a cell which does not expresses or expresses at low levels an inhibitory molecule, e.g. a cell engineered by any method described herein. For example, the cell can be a cell that does not express or expresses at low levels an inhibitory molecule, e.g., that can decrease the ability of a CAR-expressing cell to mount an immune effector response. Examples of inhibitory molecules include PD1, PD-L1, PD-L2, CTLA4, TIM3, CEACAM (e.g., CEACAM-1, CEACAM-3 and/or CEACAM-5), LAG3, VISTA, BTLA, TIGIT, LAIR1, CD160, 2B4, CD80, CD86, B7-H3 (CD276), B7-H4 (VTCN1), HVEM (TNFRSF14 or CD270), KIR, A2aR, MHC class I, MHC class II, GAL9, adenosine, and TGFR beta. Inhibition of an inhibitory molecule, e.g., by inhibition at the DNA, RNA or protein level, can optimize a CAR-expressing cell performance. In embodiments, an inhibitory nucleic acid, e.g., an inhibitory nucleic acid, e.g., a dsRNA, e.g., an siRNA or shRNA, a clustered regularly interspaced short palindromic repeats (CRISPR), a transcription-activator like effector nuclease (TALEN), or a zinc finger endonuclease (ZFN), e.g., as described herein, can be used.

[0564] siRNA and shRNA to Inhibit TCR or HLA

[0565] In some embodiments, TCR expression and/or HLA expression can be inhibited using siRNA or shRNA that targets a nucleic acid encoding a TCR, and/or HLA, and/or an inhibitory molecule described herein (e.g., PD1, PD-L1, PD-L2, CTLA4, TIM3, CEACAM (e.g., CEACAM-1, CEACAM-3 and/or CEACAM-5), LAG3, VISTA, BTLA, TIGIT, LAIR1, CD160, 2B4, CD80, CD86, B7-H3 (CD276), B7-H4 (VTCN1), HVEM (TNFRSF14 or CD270), KIR, A2aR, MHC class I, MHC class II, GAL9, adenosine, and TGFR beta), in a cell, e.g., T cell.

[0566] Expression of siRNA and shRNAs in T cells can be achieved using any conventional expression system, e.g., such as a lentiviral expression system.

[0567] Exemplary shRNAs that downregulate expression of components of the TCR are described, e.g., in US Publication No.: 2012/0321667. Exemplary siRNA and shRNA that downregulate expression of HLA class I and/or HLA class II genes are described, e.g., in U.S. publication No.: US 2007/0036773.

[0568] CRISPR to Inhibit TCR or HLA

[0569] “CRISPR” or “CRISPR to TCR and/or HLA” or “CRISPR to inhibit TCR and/or HLA” as used herein refers to a set of clustered regularly interspaced short palindromic repeats, or a system comprising such a set of repeats. “Cas”, as used herein, refers to a CRISPR-associated protein. A “CRISPR/Cas” system refers to a system derived from CRISPR and Cas which can be used to silence or mutate a TCR and/or HLA gene, and/or an inhibitory molecule described herein (e.g., PD1, PD-L1, PD-L2, CTLA4, TIM3, CEACAM (e.g., CEACAM-1, CEACAM-3 and/or CEACAM-5), LAG3, VISTA, BTLA, TIGIT, LAIR1, CD160, 2B4, CD80, CD86, B7-H3 (CD276), B7-H4 (VTCN1), HVEM (TNFRSF14 or CD270), KIR, A2aR, MHC class I, MHC class II, GAL9, adenosine, and TGFR beta).

[0570] Naturally-occurring CRISPR/Cas systems are found in approximately 40% of sequenced eubacteria genomes and 90% of sequenced archaea. Grissa et al. (2007) BMC Bioinformatics 8: 172. This system is a type of prokaryotic immune system that confers resistance to foreign genetic elements such as plasmids and phages and provides a form of acquired immunity. Barrangou et al. (2007) Science 315: 1709-1712; Marragini et al. (2008) Science 322: 1843-1845.

[0571] The CRISPR/Cas system has been modified for use in gene editing (silencing, enhancing or changing specific genes) in eukaryotes such as mice or primates. Wiedenheft et al. (2012) Nature 482: 331-8. This is accomplished by introducing into the eukaryotic cell a plasmid containing a specifically designed CRISPR and one or more appropriate Cas.

[0572] The CRISPR sequence, sometimes called a CRISPR locus, comprises alternating repeats and spacers. In a naturally-occurring CRISPR, the spacers usually comprise sequences foreign to the bacterium such as a plasmid or phage sequence; in the TCR and/or HLA CRISPR/Cas system, the spacers are derived from the TCR or HLA gene sequence.

[0573] RNA from the CRISPR locus is constitutively expressed and processed by Cas proteins into small RNAs. These comprise a spacer flanked by a repeat sequence. The RNAs guide other Cas proteins to silence exogenous genetic elements at the RNA or DNA level. Horvath et al. (2010) Science 327: 167-170; Makarova et al. (2006) Biology Direct 1: 7. The spacers thus serve as templates for RNA molecules, analogously to siRNAs. Pennisi (2013) Science 341: 833-836.

[0574] As these naturally occur in many different types of bacteria, the exact arrangements of the CRISPR and structure, function and number of Cas genes and their product differ somewhat from species to species. Haft et al. (2005) PLoS Comput. Biol. 1: e60; Kunin et al. (2007) Genome Biol. 8: R61; Mojica et al. (2005) J. Mol. Evol. 60: 174-182; Bolotin et al. (2005) Microbiol. 151: 2551-2561; Pourcel et al. (2005) Microbiol. 151: 653-663; and Stern et al. (2010) Trends. Genet. 28: 335-340. For example, the Cse (Cas subtype, E. coli) proteins (e.g., CasA) form a functional complex, Cascade, that processes CRISPR RNA transcripts into spacer-repeat units that Cascade retains. Brouns et al. (2008) Science 321: 960-964. In other prokaryotes, Cas6 processes the CRISPR transcript. The CRISPR-based phage inactivation in E. coli requires Cascade and Cas3, but not Cas1 or Cas2. The Cmr (Cas RAMP module) proteins in Pyrococcus furiosus and other prokaryotes form a functional complex with small CRISPR RNAs that recognizes and cleaves complementary target RNAs. A simpler CRISPR system relies on the protein Cas9, which is a nuclease with two active cutting sites, one for each strand of the double helix. Combining Cas9 and modified CRISPR locus RNA can be used in a system for gene editing. Pennisi (2013) Science 341: 833-836.

[0575] The CRISPR/Cas system can thus be used to edit a TCR and/or HLA gene (adding or deleting a basepair), or introducing a premature stop which thus decreases expression of a TCR and/or HLA. The CRISPR/Cas system can alternatively be used like RNA interference, turning off TCR and/or HLA gene in a reversible fashion. In a mammalian cell, for example, the RNA can guide the Cas protein to a TCR and/or HLA promoter, sterically blocking RNA polymerases.

[0576] Artificial CRISPR/Cas systems can be generated which inhibit TCR and/or HLA, using technology known in the art, e.g., that described in U.S. Publication No. 20140068797, and Cong (2013) Science 339: 819-823. Other artificial CRISPR/Cas systems that are known in the art may also be generated which inhibit TCR and/or HLA, e.g., that described in Tsai (2014) Nature Biotechnol., 32:6 569-576, U.S. Pat. Nos. 8,871,445; 8,865,406; 8,795,965; 8,771,945; and 8,697,359.

[0577] TALEN to Inhibit TCR and/or HLA

[0578] “TALEN” or “TALEN to HLA and/or TCR” or “TALEN to inhibit HLA and/or TCR” refers to a transcription activator-like effector nuclease, an artificial nuclease which can be used to edit the HLA, and/or TCR gene, and/or an inhibitory molecule described herein (e.g., PD1, PD-L1, PD-L2, CTLA4, TIM3, CEACAM (e.g., CEACAM-1, CEACAM-3 and/or CEACAM-5), LAG3, VISTA, BTLA, TIGIT, LAIR1, CD160, 2B4, CD80, CD86, B7-H3 (CD276), B7-H4 (VTCN1), HVEM (TNFRSF14 or CD270), KIR, A2aR, MHC class I, MHC class II, GAL9, adenosine, and TGFR beta).

[0579] TALENs are produced artificially by fusing a TAL effector DNA binding domain to a DNA cleavage domain. Transcription activator-like effects (TALEs) can be engineered to bind any desired DNA sequence, including a portion of the HLA or TCR gene. By combining an engineered TALE with a DNA cleavage domain, a restriction enzyme can be produced which is specific to any desired DNA sequence, including a HLA or TCR sequence. These can then be introduced into a cell, wherein they can be used for genome editing. Boch (2011) Nature Biotech. 29: 135-6; and Boch et al. (2009) Science 326: 1509-12; Moscou et al. (2009) Science 326: 3501.

[0580] TALEs are proteins secreted by Xanthomonas bacteria. The DNA binding domain contains a repeated, highly conserved 33-34 amino acid sequence, with the exception of the 12th and 13th amino acids. These two positions are highly variable, showing a strong correlation with specific nucleotide recognition. They can thus be engineered to bind to a desired DNA sequence.

[0581] To produce a TALEN, a TALE protein is fused to a nuclease (N), which is a wild-type or mutated FokI endonuclease. Several mutations to FokI have been made for its use in TALENs; these, for example, improve cleavage specificity or activity. Cermak et al. (2011) Nucl. Acids Res. 39: e82; Miller et al. (2011) Nature Biotech. 29: 143-8; Hockemeyer et al. (2011) Nature Biotech. 29: 731-734; Wood et al. (2011) Science 333: 307; Doyon et al. (2010) Nature Methods 8: 74-79; Szczepek et al. (2007) Nature Biotech. 25: 786-793; and Guo et al. (2010) J. Mol. Biol. 200: 96.

[0582] The FokI domain functions as a dimer, requiring two constructs with unique DNA binding domains for sites in the target genome with proper orientation and spacing. Both the number of amino acid residues between the TALE DNA binding domain and the FokI cleavage domain and the number of bases between the two individual TALEN binding sites appear to be important parameters for achieving high levels of activity. Miller et al. (2011) Nature Biotech. 29: 143-8.

[0583] A HLA or TCR TALEN can be used inside a cell to produce a double-stranded break (DSB). A mutation can be introduced at the break site if the repair mechanisms improperly repair the break via non-homologous end joining. For example, improper repair may introduce a frame shift mutation. Alternatively, foreign DNA can be introduced into the cell along with the TALEN; depending on the sequences of the foreign DNA and chromosomal sequence, this process can be used to correct a defect in the HLA or TCR gene or introduce such a defect into a wt HLA or TCR gene, thus decreasing expression of HLA or TCR.

[0584] TALENs specific to sequences in HLA or TCR can be constructed using any method known in the art, including various schemes using modular components. Zhang et al. (2011) Nature Biotech. 29: 149-53; Geibler et al. (2011) PLoS ONE 6: e19509.

[0585] Zinc Finger Nuclease to Inhibit HLA and/or TCR

[0586] “ZFN” or “Zinc Finger Nuclease” or “ZFN to HLA and/or TCR” or “ZFN to inhibit HLA and/or TCR” refer to a zinc finger nuclease, an artificial nuclease which can be used to edit the HLA, and/or TCR gene, and/or an inhibitory molecule described herein (e.g., PD1, PD-L1, PD-L2, CTLA4, TIM3, CEACAM (e.g., CEACAM-1, CEACAM-3 and/or CEACAM-5), LAG3, VISTA, BTLA, TIGIT, LAIR1, CD160, 2B4, CD80, CD86, B7-H3 (CD276), B7-H4 (VTCN1), HVEM (TNFRSF14 or CD270), KIR, A2aR, MHC class I, MHC class II, GAL9, adenosine, and TGFR beta).

[0587] Like a TALEN, a ZFN comprises a FokI nuclease domain (or derivative thereof) fused to a DNA-binding domain. In the case of a ZFN, the DNA-binding domain comprises one or more zinc fingers. Carroll et al. (2011) Genetics Society of America 188: 773-782; and Kim et al. (1996) Proc. Natl. Acad. Sci. USA 93: 1156-1160.

[0588] A zinc finger is a small protein structural motif stabilized by one or more zinc ions. A zinc finger can comprise, for example, Cys2His2, and can recognize an approximately 3-bp sequence. Various zinc fingers of known specificity can be combined to produce multi-finger polypeptides which recognize about 6, 9, 12, 15 or 18-bp sequences. Various selection and modular assembly techniques are available to generate zinc fingers (and combinations thereof) recognizing specific sequences, including phage display, yeast one-hybrid systems, bacterial one-hybrid and two-hybrid systems, and mammalian cells.

[0589] Like a TALEN, a ZFN must dimerize to cleave DNA. Thus, a pair of ZFNs are required to target non-palindromic DNA sites. The two individual ZFNs must bind opposite strands of the DNA with their nucleases properly spaced apart. Bitinaite et al. (1998) Proc. Natl. Acad. Sci. USA 95: 10570-5.

[0590] Also like a TALEN, a ZFN can create a double-stranded break in the DNA, which can create a frame-shift mutation if improperly repaired, leading to a decrease in the expression and amount of HLA and/or TCR in a cell. ZFNs can also be used with homologous recombination to mutate in the HLA or TCR gene.

[0591] ZFNs specific to sequences in HLA AND/OR TCR can be constructed using any method known in the art. See, e.g., Provasi (2011) Nature Med. 18: 807-815; Torikai (2013) Blood 122: 1341-1349; Cathomen et al. (2008) Mol. Ther. 16: 1200-7; Guo et al. (2010) J. Mol. Biol. 400: 96; U.S. Patent Publication 2011/0158957; and U.S. Patent Publication 2012/0060230.

### Telomerase Expression

[0592] While not wishing to be bound by any particular theory, in some embodiments, a therapeutic T cell has short term persistence in a patient, due to shortened telomeres in the T cell; accordingly, transfection with a telomerase gene can lengthen the telomeres of the T cell and improve persistence of the T cell in the patient. See Carl June, “Adoptive T cell therapy for cancer in the clinic”, Journal of Clinical Investigation, 117:1466-1476 (2007). Thus, in an embodiment, an immune effector cell, e.g., a T cell, ectopically expresses a telomerase subunit, e.g., the catalytic subunit of telomerase, e.g., TERT, e.g., hTERT. In some aspects, this disclosure provides a method of producing a CAR-expressing cell, comprising contacting a cell with a nucleic acid encoding a telomerase subunit, e.g., the catalytic subunit of telomerase, e.g., TERT, e.g., hTERT. The cell may be contacted with the nucleic acid before, simultaneous with, or after being contacted with a construct encoding a CAR.

[0593] In one aspect, the disclosure features a method of making a population of immune effector cells (e.g., T cells, NK cells). In an embodiment, the method comprises: providing a population of immune effector cells (e.g., T cells or NK cells), contacting the population of immune effector cells with a nucleic acid encoding a CAR; and contacting the population of immune effector cells with a nucleic acid encoding a telomerase subunit, e.g., hTERT, under conditions that allow for CAR and telomerase expression.

[0594] In an embodiment, the nucleic acid encoding the telomerase subunit is DNA. In an embodiment, the nucleic acid encoding the telomerase subunit comprises a promoter capable of driving expression of the telomerase subunit.

[0595] In an embodiment, hTERT has the amino acid sequence of GenBank Protein ID AAC51724.1 (Meyerson et al., “hEST2, the Putative Human Telomerase Catalytic Subunit Gene, Is Up-Regulated in Tumor Cells and during Immortalization” Cell Volume 90, Issue 4, 22 Aug. 1997, Pages 785-795) as follows:

(SEQ ID NO: 284)
[sequence omitted]

[0596] In an embodiment, the hTERT has a sequence at least 80%, 85%, 90%, 95%, 96̂, 97%, 98%, or 99% identical to the sequence of SEQ ID NO: 284. In an embodiment, the hTERT has a sequence of SEQ ID NO: 284. In an embodiment, the hTERT comprises a deletion (e.g., of no more than 5, 10, 15, 20, or 30 amino acids) at the N-terminus, the C-terminus, or both. In an embodiment, the hTERT comprises a transgenic amino acid sequence (e.g., of no more than 5, 10, 15, 20, or 30 amino acids) at the N-terminus, the C-terminus, or both.

[0597] In an embodiment, the hTERT is encoded by the nucleic acid sequence of GenBank Accession No. AF018167 (Meyerson et al., “hEST2, the Putative Human Telomerase Catalytic Subunit Gene, Is Up-Regulated in Tumor Cells and during Immortalization” Cell Volume 90, Issue 4, 22 Aug. 1997, Pages 785-795):

| (SEQ ID NO: 285) | |
|---|---|
| 1 | caggcagcgt ggtcctgctg cgcacgtggg aagccctggc cccggccacc cccgcgatgc |
| 61 | cgcgcgctcc ccgctgccga gccgtgcgct ccctgctgcg cagccactac cgcgaggtgc |
| 121 | tgccgctggc cacgttcgtg cggcgcctgg ggccccaggg ctggcggctg gtgcagcgcg |
| 181 | gggacccggc ggctttccgc gcgctggtgg cccagtgcct ggtgtgcgtg ccctgggacg |
| 241 | cacggccgcc ccccgccgcc ccctccttcc gccaggtgtc ctgcctgaag gagctggtgg |
| 301 | cccgagtgct gcagaggctg tgcgagcgcg gcgcgaagaa cgtgctggcc ttcggcttcg |
| 361 | cgctgctgga cggggcccgc gggggccccc ccgaggcctt caccaccagc gtgcgcagct |
| 421 | acctgcccaa cacggtgacc gacgcactgc gggggagcgg ggcgtggggg ctgctgttgc |
| 481 | gccgcgtggg cgacgacgtg ctggttcacc tgctggcacg ctgcgcgctc tttgtgctgg |
| 541 | tggctcccag ctgcgcctac caggtgtgcg ggccgccgct gtaccagctc ggcgctgcca |
| 601 | ctcaggcccg gcccccgcca cacgctagtg gaccccgaag gcgtctggga tgcgaacggg |
| 661 | cctggaacca tagcgtcagg gaggccgggg tccccctggg cctgccagcc ccgggtgcga |
| 721 | ggaggcgcgg gggcagtgcc agccgaagtc tgccgttgcc caagaggccc aggcgtggcg |
| 781 | ctgcccctga gccggagcgg acgcccgttg ggcaggggtc ctgggcccac ccgggcagga |
| 841 | cgcgtggacc gagtgaccgt ggtttctgtg tggtgtcacc tgccagaccc gccgaagaag |
| 901 | ccacctcttt ggagggtgcg ctctctggca cgcgccactc ccacccatcc gtgggccgcc |
| 961 | agcaccacgc gggcccccca tccacatcgc ggccaccacg tccctgggac acgccttgtc |
| 1021 | ccccggtgta cgccgagacc aagcacttcc tctactcctc aggcgacaag gagcagctgc |
| 1081 | ggccctcctt cctactcagc tctctgaggc ccagcctgac tggcgctcgg aggctcgtgg |
| 1141 | agaccatctt tctgggttcc aggccctgga tgccagggac tccccgcagg ttgccccgcc |
| 1201 | tgccccagcg ctactggcaa atgcggcccc tgtttctgga gctgcttggg aaccacgcgc |
| 1261 | agtgccccta cggggtgctc ctcaagacgc actgcccgct gcgagctgcg gtcaccccag |
| 1321 | cagccggtgt ctgtgcccgg gagaagcccc agggctctgt ggcggccccc gaggaggagg |
| 1381 | acacagaccc ccgtcgcctg gtgcagctgc tccgccagca cagcagcccc tggcaggtgt |
| 1441 | acggcttcgt gcgggcctgc ctgcgccggc tggtgccccc aggcctctgg ggctccaggc |
| 1501 | acaacgaacg ccgcttcctc aggaacacca agaagttcat ctccctgggg aagcatgcca |
| 1561 | agctctcgct gcaggagctg acgtggaaga tgagcgtgcg gggctgcgct tggctgcgca |
| 1621 | ggagcccagg ggttggctgt gttccggccg cagagcaccg tctgcgtgag gagatcctgg |
| 1681 | ccaagttcct gcactggctg atgagtgtgt acgtcgtcga gctgctcagg tctttctttt |
| 1741 | atgtcacgga gaccacgttt caaaagaaca ggctcttttt ctaccggaag agtgtctgga |
| 1801 | gcaagttgca aagcattgga atcagacagc acttgaagag ggtgcagctg cgggagctgt |
| 1861 | cggaagcaga ggtcaggcag catcgggaag ccaggcccgc cctgctgacg tccagactcc |
| 1921 | gcttcatccc caagcctgac gggctgcggc cgattgtgaa catggactac gtcgtgggag |
| 1981 | ccagaacgtt ccgcagagaa aagagggccg agcgtctcac ctcgagggtg aaggcactgt |
| 2041 | tcagcgtgct caactacgag cgggcgcggc gccccggcct cctgggcgcc tctgtgctgg |
| 2101 | gcctggacga tatccacagg gcctggcgca ccttcgtgct gcgtgtgcgg gcccaggacc |
| 2161 | cgccgcctga gctgtacttt gtcaaggtgg atgtgacggg cgcgtacgac accatccccc |
| 2221 | aggacaggct cacggaggtc atcgccagca tcatcaaacc ccagaacacg tactgcgtgc |
| 2281 | gtcggtatgc cgtggtccag aaggccgccc atgggcacgt ccgcaaggcc ttcaagagcc |
| 2341 | acgtctctac cttgacagac ctccagccgt acatgcgaca gttcgtggct cacctgcagg |
| 2401 | agaccagccc gctgagggat gccgtcgtca tcgagcagag ctcctccctg aatgaggcca |
| 2461 | gcagtggcct cttcgacgtc ttcctacgct tcatgtgcca ccacgccgtg cgcatcaggg |
| 2521 | gcaagtccta cgtccagtgc caggggatcc cgcagggctc catcctctcc acgctgctct |
| 2581 | gcagcctgtg ctacggcgac atggagaaca agctgtttgc ggggattcgg cgggacgggc |
| 2641 | tgctcctgcg tttggtggat gatttcttgt tggtgacacc tcacctcacc cacgcgaaaa |
| 2701 | ccttcctcag gaccctggtc cgaggtgtcc ctgagtatgg ctgcgtggtg aacttgcgga |
| 2761 | agacagtggt gaacttccct gtagaagacg aggccctggg tggcacggct tttgttcaga |
| 2821 | tgccggccca cggcctattc ccctggtgcg gcctgctgct ggatacccgg accctggagg |
| 2881 | tgcagagcga ctactccagc tatgcccgga cctccatcag agccagtctc accttcaacc |
| 2941 | gcggcttcaa ggctgggagg aacatgcgtc gcaaactctt tggggtcttg cggctgaagt |
| 3001 | gtcacagcct gtttctggat ttgcaggtga acagcctcca gacggtgtgc accaacatct |
| 3061 | acaagatcct cctgctgcag gcgtacaggt ttcacgcatg tgtgctgcag ctcccatttc |
| 3121 | atcagcaagt ttggaagaac cccacatttt tcctgcgcgt catctctgac acggcctccc |
| 3181 | tctgctactc catcctgaaa gccaagaacg cagggatgtc gctgggggcc aagggcgccg |
| 3241 | ccggccctct gccctccgag gccgtgcagt ggctgtgcca ccaagcattc ctgctcaagc |
| 3301 | tgactcgaca ccgtgtcacc tacgtgccac tcctggggtc actcaggaca gcccagacgc |
| 3361 | agctgagtcg gaagctcccg gggacgacgc tgactgccct ggaggccgca gccaacccgg |
| 3421 | cactgccctc agacttcaag accatcctgg actgatggcc acccgcccac agccaggccg |
| 3481 | agagcagaca ccagcagccc tgtcacgccg ggctctacgt cccagggagg gaggggcggc |
| 3541 | ccacacccag gcccgcaccg ctgggagtct gaggcctgag tgagtgtttg gccgaggcct |
| 3601 | gcatgtccgg ctgaaggctg agtgtccggc tgaggcctga gcgagtgtcc agccaagggc |
| 3661 | tgagtgtcca gcacacctgc cgtcttcact tccccacagg ctggcgctcg gctccacccc |
| 3721 | agggccagct tttcctcacc aggagcccgg cttccactcc ccacatagga atagtccatc |
| 3781 | cccagattcg ccattgttca cccctcgccc tgccctcctt tgccttccac ccccaccatc |
| 3841 | caggtggaga ccctgagaag gaccctggga gctctgggaa tttggagtga ccaaaggtgt |
| 3901 | gccctgtaca caggcgagga ccctgcacct ggatgggggt ccctgtgggt caaattgggg |
| 3961 | ggaggtgctg tgggagtaaa atactgaata tatgagtttt tcagttttga aaaaaaaaaa |
| 4021 | aaaaaaa |

[0598] In an embodiment, the hTERT is encoded by a nucleic acid having a sequence at least 80%, 85%, 90%, 95%, 96, 97%, 98%, or 99% identical to the sequence of SEQ ID NO: 285. In an embodiment, the hTERT is encoded by a nucleic acid of SEQ ID NO: 285.

### Activation and Expansion of T Cells

[0599] T cells may be activated and expanded generally using methods as described, for example, in U.S. Pat. Nos. 6,352,694; 6,534,055; 6,905,680; 6,692,964; 5,858,358; 6,887,466; 6,905,681; 7,144,575; 7,067,318; 7,172,869; 7,232,566; 7,175,843; 5,883,223; 6,905,874; 6,797,514; 6,867,041; and U.S. Patent Application Publication No. 20060121005.

[0600] Generally, the T cells of the invention may be expanded by contact with a surface having attached thereto an agent that stimulates a CD3/TCR complex associated signal and a ligand that stimulates a costimulatory molecule on the surface of the T cells. In particular, T cell populations may be stimulated as described herein, such as by contact with an anti-CD3 antibody, or antigen-binding fragment thereof, or an anti-CD2 antibody immobilized on a surface, or by contact with a protein kinase C activator (e.g., bryostatin) in conjunction with a calcium ionophore. For co-stimulation of an accessory molecule on the surface of the T cells, a ligand that binds the accessory molecule is used. For example, a population of T cells can be contacted with an anti-CD3 antibody and an anti-CD28 antibody, under conditions appropriate for stimulating proliferation of the T cells. To stimulate proliferation of either CD4+ T cells or CD8+ T cells, an anti-CD3 antibody and an anti-CD28 antibody can be used. Examples of an anti-CD28 antibody include 9.3, B-T3, XR-CD28 (Diaclone, Besancon, France) can be used as can other methods commonly known in the art (Berg et al., Transplant Proc. 30(8):3975-3977, 1998; Haanen et al., J. Exp. Med. 190(9):13191328, 1999; Garland et al., J. Immunol Meth. 227(1-2):53-63, 1999).

[0601] In certain aspects, the primary stimulatory signal and the costimulatory signal for the T cell may be provided by different protocols. For example, the agents providing each signal may be in solution or coupled to a surface. When coupled to a surface, the agents may be coupled to the same surface (i.e., in “cis” formation) or to separate surfaces (i.e., in “trans” formation). Alternatively, one agent may be coupled to a surface and the other agent in solution. In one aspect, the agent providing the costimulatory signal is bound to a cell surface and the agent providing the primary activation signal is in solution or coupled to a surface. In certain aspects, both agents can be in solution. In one aspect, the agents may be in soluble form, and then cross-linked to a surface, such as a cell expressing Fc receptors or an antibody or other binding agent which will bind to the agents. In this regard, see for example, U.S. Patent Application Publication Nos. 20040101519 and 20060034810 for artificial antigen presenting cells (aAPCs) that are contemplated for use in activating and expanding T cells in the present invention.

[0602] In one aspect, the two agents are immobilized on beads, either on the same bead, i.e., “cis,” or to separate beads, i.e., “trans.” By way of example, the agent providing the primary activation signal is an anti-CD3 antibody or an antigen-binding fragment thereof and the agent providing the costimulatory signal is an anti-CD28 antibody or antigen-binding fragment thereof; and both agents are co-immobilized to the same bead in equivalent molecular amounts. In one aspect, a 1:1 ratio of each antibody bound to the beads for CD4+ T cell expansion and T cell growth is used. In certain aspects of the present invention, a ratio of anti CD3:CD28 antibodies bound to the beads is used such that an increase in T cell expansion is observed as compared to the expansion observed using a ratio of 1:1. In one particular aspect an increase of from about 1 to about 3 fold is observed as compared to the expansion observed using a ratio of 1:1. In one aspect, the ratio of CD3:CD28 antibody bound to the beads ranges from 100:1 to 1:100 and all integer values there between. In one aspect of the present invention, more anti-CD28 antibody is bound to the particles than anti-CD3 antibody, i.e., the ratio of CD3:CD28 is less than one. In certain aspects of the invention, the ratio of anti CD28 antibody to anti CD3 antibody bound to the beads is greater than 2:1. In one particular aspect, a 1:100 CD3:CD28 ratio of antibody bound to beads is used. In one aspect, a 1:75 CD3:CD28 ratio of antibody bound to beads is used. In a further aspect, a 1:50 CD3:CD28 ratio of antibody bound to beads is used. In one aspect, a 1:30 CD3:CD28 ratio of antibody bound to beads is used. In one preferred aspect, a 1:10 CD3:CD28 ratio of antibody bound to beads is used. In one aspect, a 1:3 CD3:CD28 ratio of antibody bound to the beads is used. In yet one aspect, a 3:1 CD3:CD28 ratio of antibody bound to the beads is used.

[0603] Ratios of particles to cells from 1:500 to 500:1 and any integer values in between may be used to stimulate T cells or other target cells. As those of ordinary skill in the art can readily appreciate, the ratio of particles to cells may depend on particle size relative to the target cell. For example, small sized beads could only bind a few cells, while larger beads could bind many. In certain aspects the ratio of cells to particles ranges from 1:100 to 100:1 and any integer values in-between and in further aspects the ratio comprises 1:9 to 9:1 and any integer values in between, can also be used to stimulate T cells. The ratio of anti-CD3- and anti-CD28-coupled particles to T cells that result in T cell stimulation can vary as noted above, however certain preferred values include 1:100, 1:50, 1:40, 1:30, 1:20, 1:10, 1:9, 1:8, 1:7, 1:6, 1:5, 1:4, 1:3, 1:2, 1:1, 2:1, 3:1, 4:1, 5:1, 6:1, 7:1, 8:1, 9:1, 10:1, and 15:1 with one preferred ratio being at least 1:1 particles per T cell. In one aspect, a ratio of particles to cells of 1:1 or less is used. In one particular aspect, a preferred particle: cell ratio is 1:5. In further aspects, the ratio of particles to cells can be varied depending on the day of stimulation. For example, in one aspect, the ratio of particles to cells is from 1:1 to 10:1 on the first day and additional particles are added to the cells every day or every other day thereafter for up to 10 days, at final ratios of from 1:1 to 1:10 (based on cell counts on the day of addition). In one particular aspect, the ratio of particles to cells is 1:1 on the first day of stimulation and adjusted to 1:5 on the third and fifth days of stimulation. In one aspect, particles are added on a daily or every other day basis to a final ratio of 1:1 on the first day, and 1:5 on the third and fifth days of stimulation. In one aspect, the ratio of particles to cells is 2:1 on the first day of stimulation and adjusted to 1:10 on the third and fifth days of stimulation. In one aspect, particles are added on a daily or every other day basis to a final ratio of 1:1 on the first day, and 1:10 on the third and fifth days of stimulation. One of skill in the art will appreciate that a variety of other ratios may be suitable for use in the present invention. In particular, ratios will vary depending on particle size and on cell size and type. In one aspect, the most typical ratios for use are in the neighborhood of 1:1, 2:1 and 3:1 on the first day.

[0604] In further aspects of the present invention, the cells, such as T cells, are combined with agent-coated beads, the beads and the cells are subsequently separated, and then the cells are cultured. In an alternative aspect, prior to culture, the agent-coated beads and cells are not separated but are cultured together. In a further aspect, the beads and cells are first concentrated by application of a force, such as a magnetic force, resulting in increased ligation of cell surface markers, thereby inducing cell stimulation.

[0605] By way of example, cell surface proteins may be ligated by allowing paramagnetic beads to which anti-CD3 and anti-CD28 are attached (3×28 beads) to contact the T cells. In one aspect the cells (for example, 10⁴ to 10⁹ T cells) and beads (for example, DYNABEADS® M-450 CD3/CD28 T paramagnetic beads at a ratio of 1:1) are combined in a buffer, for example PBS (without divalent cations such as, calcium and magnesium). Again, those of ordinary skill in the art can readily appreciate any cell concentration may be used. For example, the target cell may be very rare in the sample and comprise only 0.01% of the sample or the entire sample (i.e., 100%) may comprise the target cell of interest. Accordingly, any cell number is within the context of the present invention. In certain aspects, it may be desirable to significantly decrease the volume in which particles and cells are mixed together (i.e., increase the concentration of cells), to ensure maximum contact of cells and particles. For example, in one aspect, a concentration of about 10 billion cells/ml, 9 billion/ml, 8 billion/ml, 7 billion/ml, 6 billion/ml, 5 billion/ml, or 2 billion cells/ml is used. In one aspect, greater than 100 million cells/ml is used. In a further aspect, a concentration of cells of 10, 15, 20, 25, 30, 35, 40, 45, or 50 million cells/ml is used. In yet one aspect, a concentration of cells from 75, 80, 85, 90, 95, or 100 million cells/ml is used. In further aspects, concentrations of 125 or 150 million cells/ml can be used. Using high concentrations can result in increased cell yield, cell activation, and cell expansion. Further, use of high cell concentrations allows more efficient capture of cells that may weakly express target antigens of interest, such as CD28-negative T cells. Such populations of cells may have therapeutic value and would be desirable to obtain in certain aspects. For example, using high concentration of cells allows more efficient selection of CD8+ T cells that normally have weaker CD28 expression.

[0606] In one embodiment, cells transduced with a nucleic acid encoding a CAR, e.g., a CAR described herein, are expanded, e.g., by a method described herein. In one embodiment, the cells are expanded in culture for a period of several hours (e.g., about 2, 3, 4, 5, 6, 7, 8, 9, 10, 15, 18, 21 hours) to about 14 days (e.g., 1, 2, 3, 4, 5, 6, 7, 8, 9, 10, 11, 12, 13 or 14 days). In one embodiment, the cells are expanded for a period of 4 to 9 days. In one embodiment, the cells are expanded for a period of 8 days or less, e.g., 7, 6 or 5 days. In one embodiment, the cells, e.g., a BCMA CAR cell described herein, are expanded in culture for 5 days, and the resulting cells are more potent than the same cells expanded in culture for 9 days under the same culture conditions. Potency can be defined, e.g., by various T cell functions, e.g. proliferation, target cell killing, cytokine production, activation, migration, or combinations thereof. In one embodiment, the cells, e.g., a BCMA CAR cell described herein, expanded for 5 days show at least a one, two, three or four fold increase in cells doublings upon antigen stimulation as compared to the same cells expanded in culture for 9 days under the same culture conditions. In one embodiment, the cells, e.g., the cells expressing a BCMA CAR described herein, are expanded in culture for 5 days, and the resulting cells exhibit higher proinflammatory cytokine production, e.g., IFN-γ and/or GM-CSF levels, as compared to the same cells expanded in culture for 9 days under the same culture conditions. In one embodiment, the cells, e.g., a BCMA CAR cell described herein, expanded for 5 days show at least a one, two, three, four, five, ten fold or more increase in pg/ml of proinflammatory cytokine production, e.g., IFN-γ and/or GM-CSF levels, as compared to the same cells expanded in culture for 9 days under the same culture conditions.

[0607] In one aspect of the present invention, the mixture may be cultured for several hours (about 3 hours) to about 14 days or any hourly integer value in between. In one aspect, the mixture may be cultured for 21 days. In one aspect of the invention the beads and the T cells are cultured together for about eight days. In one aspect, the beads and T cells are cultured together for 2-3 days. Several cycles of stimulation may also be desired such that culture time of T cells can be 60 days or more. Conditions appropriate for T cell culture include an appropriate media (e.g., Minimal Essential Media or RPMI Media 1640 or, X-vivo 15, (Lonza)) that may contain factors necessary for proliferation and viability, including serum (e.g., fetal bovine or human serum), interleukin-2 (IL-2), insulin, IFN-γ, IL-4, IL-7, GM-CSF, IL-10, IL-12, IL-15, TGFβ, and TNF-α or any other additives for the growth of cells known to the skilled artisan. Other additives for the growth of cells include, but are not limited to, surfactant, plasmanate, and reducing agents such as N-acetyl-cysteine and 2-mercaptoethanol. Media can include RPMI 1640, AIM-V, DMEM, MEM, α-MEM, F-12, X-Vivo 15, and X-Vivo 20, Optimizer, with added amino acids, sodium pyruvate, and vitamins, either serum-free or supplemented with an appropriate amount of serum (or plasma) or a defined set of hormones, and/or an amount of cytokine(s) sufficient for the growth and expansion of T cells. Antibiotics, e.g., penicillin and streptomycin, are included only in experimental cultures, not in cultures of cells that are to be infused into a subject. The target cells are maintained under conditions necessary to support growth, for example, an appropriate temperature (e.g., 37° C.) and atmosphere (e.g., air plus 5% CO₂).

[0608] In one embodiment, the cells are expanded in an appropriate media (e.g., media described herein) that includes one or more interleukin that result in at least a 200-fold (e.g., 200-fold, 250-fold, 300-fold, 350-fold) increase in cells over a 14 day expansion period, e.g., as measured by a method described herein such as flow cytometry. In one embodiment, the cells are expanded in the presence of IL-15 and/or IL-7 (e.g., IL-15 and IL-7).

[0609] In embodiments, methods described herein, e.g., CAR-expressing cell manufacturing methods, comprise removing T regulatory cells, e.g., CD25+ T cells, from a cell population, e.g., using an anti-CD25 antibody, or fragment thereof, or a CD25-binding ligand, IL-2. Methods of removing T regulatory cells, e.g., CD25+ T cells, from a cell population are described herein. In embodiments, the methods, e.g., manufacturing methods, further comprise contacting a cell population (e.g., a cell population in which T regulatory cells, such as CD25+ T cells, have been depleted; or a cell population that has previously contacted an anti-CD25 antibody, fragment thereof, or CD25-binding ligand) with IL-15 and/or IL-7. For example, the cell population (e.g., that has previously contacted an anti-CD25 antibody, fragment thereof, or CD25-binding ligand) is expanded in the presence of IL-15 and/or IL-7.

[0610] In some embodiments a CAR-expressing cell described herein is contacted with a composition comprising a interleukin-15 (IL-15) polypeptide, a interleukin-15 receptor alpha (IL-15Ra) polypeptide, or a combination of both a IL-15 polypeptide and a IL-15Ra polypeptide e.g., hetIL-15, during the manufacturing of the CAR-expressing cell, e.g., ex vivo. In embodiments, a CAR-expressing cell described herein is contacted with a composition comprising a IL-15 polypeptide during the manufacturing of the CAR-expressing cell, e.g., ex vivo. In embodiments, a CAR-expressing cell described herein is contacted with a composition comprising a combination of both a IL-15 polypeptide and a IL-15 Ra polypeptide during the manufacturing of the CAR-expressing cell, e.g., ex vivo. In embodiments, a CAR-expressing cell described herein is contacted with a composition comprising hetIL-15 during the manufacturing of the CAR-expressing cell, e.g., ex vivo.

[0611] In one embodiment the CAR-expressing cell described herein is contacted with a composition comprising hetIL-15 during ex vivo expansion. In an embodiment, the CAR-expressing cell described herein is contacted with a composition comprising an IL-15 polypeptide during ex vivo expansion. In an embodiment, the CAR-expressing cell described herein is contacted with a composition comprising both an IL-15 polypeptide and an IL-15Ra polypeptide during ex vivo expansion. In one embodiment the contacting results in the survival and proliferation of a lymphocyte subpopulation, e.g., CD8+ T cells.

[0612] T cells that have been exposed to varied stimulation times may exhibit different characteristics. For example, typical blood or apheresed peripheral blood mononuclear cell products have a helper T cell population (TH, CD4+) that is greater than the cytotoxic or suppressor T cell population (TC, CD8+). Ex vivo expansion of T cells by stimulating CD3 and CD28 receptors produces a population of T cells that prior to about days 8-9 consists predominately of TH cells, while after about days 8-9, the population of T cells comprises an increasingly greater population of TC cells. Accordingly, depending on the purpose of treatment, infusing a subject with a T cell population comprising predominately of TH cells may be advantageous. Similarly, if an antigen-specific subset of TC cells has been isolated it may be beneficial to expand this subset to a greater degree.

[0613] Further, in addition to CD4 and CD8 markers, other phenotypic markers vary significantly, but in large part, reproducibly during the course of the cell expansion process. Thus, such reproducibility enables the ability to tailor an activated T cell product for specific purposes.

[0614] Once a BCMA CAR is constructed, various assays can be used to evaluate the activity of the molecule, such as but not limited to, the ability to expand T cells following antigen stimulation, sustain T cell expansion in the absence of re-stimulation, and anti-cancer activities in appropriate in vitro and animal models. Assays to evaluate the effects of a BCMA CAR are described in further detail below

[0615] Western blot analysis of CAR expression in primary T cells can be used to detect the presence of monomers and dimers. See, e.g., Milone et al., Molecular Therapy 17(8): 1453-1464 (2009). Very briefly, T cells (1:1 mixture of CD4⁺ and CD8⁺ T cells) expressing the CARs are expanded in vitro for more than 10 days followed by lysis and SDS-PAGE under reducing conditions. CARs containing the full length TCR-ζ cytoplasmic domain and the endogenous TCR-ζ chain are detected by western blotting using an antibody to the TCR-ζ chain. The same T cell subsets are used for SDS-PAGE analysis under non-reducing conditions to permit evaluation of covalent dimer formation.

[0616] In vitro expansion of CAR⁺ T cells following antigen stimulation can be measured by flow cytometry. For example, a mixture of CD4⁺ and CD8⁺ T cells are stimulated with αCD3/αCD28 aAPCs followed by transduction with lentiviral vectors expressing GFP under the control of the promoters to be analyzed. Exemplary promoters include the CMV IE gene, EF-1α, ubiquitin C, or phosphoglycerokinase (PGK) promoters. GFP fluorescence is evaluated on day 6 of culture in the CD4⁺ and/or CD8⁺ T cell subsets by flow cytometry. See, e.g., Milone et al., Molecular Therapy 17(8): 1453-1464 (2009). Alternatively, a mixture of CD4⁺ and CD8⁺ T cells are stimulated with αCD3/αCD28 coated magnetic beads on day 0, and transduced with CAR on day 1 using a bicistronic lentiviral vector expressing CAR along with eGFP using a 2A ribosomal skipping sequence. Cultures are re-stimulated with BCMA-expressing cells, such as multiple myeloma cell lines or K562-BCMA, following washing. Exogenous IL-2 is added to the cultures every other day at 100 IU/ml. GFP T cells are enumerated by flow cytometry using bead-based counting. See, e.g., Milone et al., Molecular Therapy 17(8): 1453-1464 (2009).

[0617] Sustained CAR⁺ T cell expansion in the absence of re-stimulation can also be measured. See, e.g., Milone et al., Molecular Therapy 17(8): 1453-1464 (2009). Briefly, mean T cell volume (fl) is measured on day 8 of culture using a Coulter Multisizer III particle counter, a Nexcelom Cellometer Vision or Millipore Scepter, following stimulation with αCD3/αCD28 coated magnetic beads on day 0, and transduction with the indicated CAR on day 1.

[0618] Animal models can also be used to measure a CART activity. For example, xenograft model using human BCMA-specific CAR⁺ T cells to treat a primary human multiple myeloma in immunodeficient mice can be used. See, e.g., Milone et al., Molecular Therapy 17(8): 1453-1464 (2009). Very briefly, after establishment of MM, mice are randomized as to treatment groups. Different numbers of BCMA CART cells can be injected into immunodeficient mice bearing MM. Animals are assessed for disease progression and tumor burden at weekly intervals. Survival curves for the groups are compared using the log-rank test. In addition, absolute peripheral blood CD4⁺ and CD8⁺ T cell counts 4 weeks following T cell injection in the immunodeficient mice can also be analyzed. Mice are injected with multiple myeloma cells and 3 weeks later are injected with T cells engineered to express BCMA CAR, e.g., by a bicistronic lentiviral vector that encodes the CAR linked to eGFP. T cells are normalized to 45-50% input GFP T cells by mixing with mock-transduced cells prior to injection, and confirmed by flow cytometry. Animals are assessed for leukemia at 1-week intervals. Survival curves for the CAR⁺ T cell groups are compared using the log-rank test.

[0619] Assessment of cell proliferation and cytokine production has been previously described, e.g., at Milone et al., Molecular Therapy 17(8): 1453-1464 (2009). Briefly, assessment of CAR-mediated proliferation is performed in microtiter plates by mixing washed T cells with K562 cells expressing BCMA or other BCMA-expressing myeloma cells are irradiated with gamma-radiation prior to use. Anti-CD3 (clone OKT3) and anti-CD28 (clone 9.3) monoclonal antibodies are added to cultures with KT32-BBL cells to serve as a positive control for stimulating T-cell proliferation since these signals support long-term CD8⁺ T cell expansion ex vivo. T cells are enumerated in cultures using CountBright™ fluorescent beads (Invitrogen, Carlsbad, Calif.) and flow cytometry as described by the manufacturer. CAR⁺ T cells are identified by GFP expression using T cells that are engineered with eGFP-2A linked CAR-expressing lentiviral vectors. For CAR+ T cells not expressing GFP, the CAR+ T cells are detected with biotinylated recombinant BCMA protein and a secondary avidin-PE conjugate. CD4+ and CD8⁺ expression on T cells are also simultaneously detected with specific monoclonal antibodies (BD Biosciences). Cytokine measurements are performed on supernatants collected 24 hours following re-stimulation using the human TH1/TH2 cytokine cytometric bead array kit (BD Biosciences, San Diego, Calif.) according the manufacturer's instructions. Fluorescence is assessed using a FACScalibur flow cytometer, and data is analyzed according to the manufacturer's instructions.

[0620] Cytotoxicity can be assessed by a standard 51Cr-release assay. See, e.g., Milone et al., Molecular Therapy 17(8): 1453-1464 (2009). Briefly, target cells (e.g., K562 lines expressing BCMA and primary multiple myeloma cells) are loaded with 51Cr (as NaCrO4, New England Nuclear, Boston, Mass.) at 37° C. for 2 hours with frequent agitation, washed twice in complete RPMI and plated into microtiter plates. Effector T cells are mixed with target cells in the wells in complete RPMI at varying ratios of effector cell:target cell (E:T). Additional wells containing media only (spontaneous release, SR) or a 1% solution of triton-X 100 detergent (total release, TR) are also prepared. After 4 hours of incubation at 37° C., supernatant from each well is harvested. Released 51Cr is then measured using a gamma particle counter (Packard Instrument Co., Waltham, Mass.). Each condition is performed in at least triplicate, and the percentage of lysis is calculated using the formula: % Lysis=(ER−SR)/(TR−SR), where ER represents the average 51Cr released for each experimental condition.

[0621] Imaging technologies can be used to evaluate specific trafficking and proliferation of CARs in tumor-bearing animal models. Such assays have been described, for example, in Barrett et al., Human Gene Therapy 22:1575-1586 (2011). Briefly, NOD/SCID/γc^{-/-} (NSG) mice or other immunodeficient are injected IV with multiple myeloma cells followed 7 days later with BCMA CART cells 4 hour after electroporation with the CAR constructs. The T cells are stably transfected with a lentiviral construct to express firefly luciferase, and mice are imaged for bioluminescence. Alternatively, therapeutic efficacy and specificity of a single injection of CAR⁺ T cells in a multiple myeloma xenograft model can be measured as the following: NSG mice are injected with multiple myeloma cells transduced to stably express firefly luciferase, followed by a single tail-vein injection of T cells electroporated with BCMA CAR construct days later. Animals are imaged at various time points post injection. For example, photon-density heat maps of firefly luciferasepositive tumors in representative mice at day 5 (2 days before treatment) and day 8 (24 hr post CAR^{P} PBLs) can be generated.

[0622] Alternatively, or in combination to the methods disclosed herein, methods and compositions for one or more of: detection and/or quantification of CAR-expressing cells (e.g., in vitro or in vivo (e.g., clinical monitoring)); immune cell expansion and/or activation; and/or CAR-specific selection, that involve the use of a CAR ligand, are disclosed. In one exemplary embodiment, the CAR ligand is an antibody that binds to the CAR molecule, e.g., binds to the extracellular antigen binding domain of CAR (e.g., an antibody that binds to the antigen binding domain, e.g., an anti-idiotypic antibody; or an antibody that binds to a constant region of the extracellular binding domain). In other embodiments, the CAR ligand is a CAR antigen molecule (e.g., a CAR antigen molecule as described herein).

[0623] In one aspect, a method for detecting and/or quantifying CAR-expressing cells is disclosed. For example, the CAR ligand can be used to detect and/or quantify CAR-expressing cells in vitro or in vivo (e.g., clinical monitoring of CAR-expressing cells in a patient, or dosing a patient). The method includes:

[0624] providing the CAR ligand (optionally, a labelled CAR ligand, e.g., a CAR ligand that includes a tag, a bead, a radioactive or fluorescent label);

[0625] acquiring the CAR-expressing cell (e.g., acquiring a sample containing CAR-expressing cells, such as a manufacturing sample or a clinical sample);

[0626] contacting the CAR-expressing cell with the CAR ligand under conditions where binding occurs, thereby detecting the level (e.g., amount) of the CAR-expressing cells present. Binding of the CAR-expressing cell with the CAR ligand can be detected using standard techniques such as FACS, ELISA and the like.

[0627] In another aspect, a method of expanding and/or activating cells (e.g., immune effector cells) is disclosed. The method includes:

[0628] providing a CAR-expressing cell (e.g., a first CAR-expressing cell or a transiently expressing CAR cell);

[0629] contacting said CAR-expressing cell with a CAR ligand, e.g., a CAR ligand as described herein), under conditions where immune cell expansion and/or proliferation occurs, thereby producing the activated and/or expanded cell population.

[0630] In certain embodiments, the CAR ligand is present on (e.g., is immobilized or attached to a substrate, e.g., a non-naturally occurring substrate). In some embodiments, the substrate is a non-cellular substrate. The non-cellular substrate can be a solid support chosen from, e.g., a plate (e.g., a microtiter plate), a membrane (e.g., a nitrocellulose membrane), a matrix, a chip or a bead. In embodiments, the CAR ligand is present in the substrate (e.g., on the substrate surface). The CAR ligand can be immobilized, attached, or associated covalently or non-covalently (e.g., cross-linked) to the substrate. In one embodiment, the CAR ligand is attached (e.g., covalently attached) to a bead. In the aforesaid embodiments, the immune cell population can be expanded in vitro or ex vivo. The method can further include culturing the population of immune cells in the presence of the ligand of the CAR molecule, e.g., using any of the methods described herein.

[0631] In other embodiments, the method of expanding and/or activating the cells further comprises addition of a second stimulatory molecule, e.g., CD28. For example, the CAR ligand and the second stimulatory molecule can be immobilized to a substrate, e.g., one or more beads, thereby providing increased cell expansion and/or activation.

[0632] In yet another aspect, a method for selecting or enriching for a CAR expressing cell is provided. The method includes contacting the CAR expressing cell with a CAR ligand as described herein; and selecting the cell on the basis of binding of the CAR ligand.

[0633] In yet other embodiments, a method for depleting, reducing and/or killing a CAR expressing cell is provided. The method includes contacting the CAR expressing cell with a CAR ligand as described herein; and targeting the cell on the basis of binding of the CAR ligand, thereby reducing the number, and/or killing, the CAR-expressing cell. In one embodiment, the CAR ligand is coupled to a toxic agent (e.g., a toxin or a cell ablative drug). In another embodiment, the anti-idiotypic antibody can cause effector cell activity, e.g., ADCC or ADC activities.

[0634] Exemplary anti-CAR antibodies that can be used in the methods disclosed herein are described, e.g., in WO 2014/190273 and by Jena et al., “Chimeric Antigen Receptor (CAR)-Specific Monoclonal Antibody to Detect CD19-Specific T cells in Clinical Trials”, PLOS March 2013 8:3 e57838, the contents of which are incorporated by reference. In one embodiment, the anti-idiotypic antibody molecule recognizes an anti-CD19 antibody molecule, e.g., an anti-CD19 scFv. For instance, the anti-idiotypic antibody molecule can compete for binding with the CD19-specific CAR mAb clone no. 136.20.1 described in Jena et al., PLOS March 2013 8:3 e57838; may have the same CDRs (e.g., one or more of, e.g., all of, VH CDR1, VH CDR2, CH CDR3, VL CDR1, VL CDR2, and VL CDR3, using the Kabat definition, the Chothia definition, or a combination of the Kabat and Chothia definitions) as the CD19-specific CAR mAb clone no. 136.20.1; may have one or more (e.g., 2) variable regions as the CD19-specific CAR mAb clone no. 136.20.1, or may comprise the CD19-specific CAR mAb clone no. 136.20.1. In some embodiments, the anti-idiotypic antibody was made according to a method described in Jena et al. In another embodiment, the anti-idiotypic antibody molecule is an anti-idiotypic antibody molecule described in WO 2014/190273. In some embodiments, the anti-idiotypic antibody molecule has the same CDRs (e.g., one or more of, e.g., all of, VH CDR1, VH CDR2, CH CDR3, VL CDR1, VL CDR2, and VL CDR3) as an antibody molecule of WO 2014/190273 such as 136.20.1; may have one or more (e.g., 2) variable regions of an antibody molecule of WO 2014/190273, or may comprise an antibody molecule of WO 2014/190273 such as 136.20.1. In other embodiments, the anti-CAR antibody binds to a constant region of the extracellular binding domain of the CAR molecule, e.g., as described in WO 2014/190273. In some embodiments, the anti-CAR antibody binds to a constant region of the extracellular binding domain of the CAR molecule, e.g., a heavy chain constant region (e.g., a CH2-CH3 hinge region) or light chain constant region. For instance, in some embodiments the anti-CAR antibody competes for binding with the 2D3 monoclonal antibody described in WO 2014/190273, has the same CDRs (e.g., one or more of, e.g., all of, VH CDR1, VH CDR2, CH CDR3, VL CDR1, VL CDR2, and VL CDR3) as 2D3, or has one or more (e.g., 2) variable regions of 2D3, or comprises 2D3 as described in WO 2014/190273.

[0635] In some aspects and embodiments, the compositions and methods herein are optimized for a specific subset of T cells, e.g., as described in U.S. Ser. No. 62/031,699 filed Jul. 31, 2014, the contents of which are incorporated herein by reference in their entirety. In some embodiments, the optimized subsets of T cells display an enhanced persistence compared to a control T cell, e.g., a T cell of a different type (e.g., CD8⁺ or CD4⁺) expressing the same construct.

[0636] In some embodiments, a CD4⁺ T cell comprises a CAR described herein, which CAR comprises an intracellular signaling domain suitable for (e.g., optimized for, e.g., leading to enhanced persistence in) a CD4⁺ T cell, e.g., an ICOS domain. In some embodiments, a CD8⁺ T cell comprises a CAR described herein, which CAR comprises an intracellular signaling domain suitable for (e.g., optimized for, e.g., leading to enhanced persistence of) a CD8⁺ T cell, e.g., a 4-1BB domain, a CD28 domain, or another costimulatory domain other than an ICOS domain. In some embodiments, the CAR described herein comprises an antigen binding domain described herein, e.g., a CAR comprising an antigen binding domain that targets BCMA, e.g., a CAR of Table 1 or 16).

[0637] In an aspect, described herein is a method of treating a subject, e.g., a subject having cancer. The method includes administering to said subject, an effective amount of:

[0638] 1) a CD4⁺ T cell comprising a CAR (the CAR^{CD4+})

[0639] comprising:

[0640] an antigen binding domain, e.g., an antigen binding domain described herein, e.g., an antigen binding domain that targets BCMA, e.g., an antigen-binding domain of Table 1 or 16;

[0641] a transmembrane domain; and

[0642] an intracellular signaling domain, e.g., a first costimulatory domain, e.g., an ICOS domain; and

[0643] 2) a CD8⁺ T cell comprising a CAR (the CAR^{CD8+}) comprising:

[0644] an antigen binding domain, e.g., an antigen binding domain described herein, e.g., an antigen binding domain that targets BCMA, e.g., an antigen-binding domain of Table 1 or 16;

[0645] a transmembrane domain; and

[0646] an intracellular signaling domain, e.g., a second co stimulatory domain, e.g., a 4-1BB domain, a CD28 domain, or another costimulatory domain other than an ICOS domain; wherein the CAR^{CD4+} and the CAR^{CD8+} differ from one another.

[0647] Optionally, the method further includes administering:

[0648] 3) a second CD8+ T cell comprising a CAR (the second CAR^{CD8+}) comprising:

[0649] an antigen binding domain, e.g., an antigen binding domain described herein, e.g., an antigen binding domain that specifically binds BCMA, e.g., an antigen-binding domain of Table 1 or 16;

[0650] a transmembrane domain; and
[0651] an intracellular signaling domain, wherein the second CAR^{cD8+} comprises an intracellular signaling domain, e.g., a costimulatory signaling domain, not present on the CAR^{CD8+}, and, optionally, does not comprise an ICOS signaling domain.

[0652] Other assays, including those described in the Example section herein as well as those that are known in the art can also be used to evaluate the BCMA CAR constructs of the invention.

### Therapeutic Application

[0653] BCMA Associated Diseases and/or Disorders

[0654] In one aspect, the invention provides methods for treating a disease associated with BCMA expression. In one aspect, the invention provides methods for treating a disease wherein part of the tumor is negative for BCMA and part of the tumor is positive for BCMA For example, the CAR of the invention is useful for treating subjects that have undergone treatment for a disease associated with elevated expression of BCMA, wherein the subject that has undergone treatment for elevated levels of BCMA exhibits a disease associated with elevated levels of BCMA. In embodiments, the CAR of the invention is useful for treating subjects that have undergone treatment for a disease associated with expression of BCMA, wherein the subject that has undergone treatment related to expression of BCMA exhibits a disease associated with expression of BCMA.

[0655] In one embodiment, the invention provides methods for treating a disease wherein BCMA is expressed on both normal cells and cancers cells, but is expressed at lower levels on normal cells. In one embodiment, the method further comprises selecting a CAR that binds of the invention with an affinity that allows the BCMA CAR to bind and kill the cancer cells expressing BCMA but less than 30%, 25%, 20%, 15%, 10%, 5% or less of the normal cells expressing BCMA are killed, e.g., as determined by an assay described herein. For example, a killing assay such as flow cytometry based on Cr51 CTL can be used. In one embodiment, the BCMA CAR has an antigen binding domain that has a binding affinity KD of 10⁻⁴ M to 10⁻⁸ M, e.g., 10⁻⁵ M to 10⁻⁷ M, e.g., 10⁻⁶ M or 10⁻⁷ M, for the target antigen. In one embodiment, the BCMA antigen binding domain has a binding affinity that is at least five-fold, 10-fold, 20-fold, 30-fold, 50-fold, 100-fold or 1,000-fold less than a reference antibody, e.g., an antibody described herein.

[0656] In one aspect, the invention pertains to a vector comprising BCMA CAR operably linked to promoter for expression in mammalian immune effector cells, e.g., T cells or NK cells. In one aspect, the invention provides a recombinant immune effector cell, e.g., T cell or NK cell, expressing the BCMA CAR for use in treating BCMA-expressing tumors, wherein the recombinant immune effector cell (e.g., T cell or NK cell) expressing the BCMA CAR is termed a BCMA CAR-expressing cell (e.g., BCMA CART or BCMA CAR-expressing NK cell). In one aspect, the BCMA CAR-expressing cell (e.g., BCMA CART or BCMA CAR-expressing NK cell) of the invention is capable of contacting a tumor cell with at least one BCMA CAR of the invention expressed on its surface such that the BCMA CAR-expressing cell (e.g., BCMA CART or BCMA CAR-expressing NK cell) targets the tumor cell and growth of the tumor is inhibited.

[0657] In one aspect, the invention pertains to a method of inhibiting growth of a BCMA-expressing tumor cell, comprising contacting the tumor cell with a BCMA CAR-expressing cell (e.g., BCMA CART or BCMA CAR-expressing NK cell) of the present invention such that the BCMA CAR-expressing cell (e.g., BCMA CART or BCMA CAR-expressing NK cell) is activated in response to the antigen and targets the cancer cell, wherein the growth of the tumor is inhibited.

[0658] In one aspect, the invention pertains to a method of treating cancer in a subject. The method comprises administering to the subject a BCMA CAR-expressing cell (e.g., BCMA CART or BCMA CAR-expressing NK cell) of the present invention such that the cancer is treated in the subject. An example of a cancer that is treatable by the BCMA CAR-expressing cell (e.g., BCMA CART or BCMA CAR-expressing NK cell) of the invention is a cancer associated with expression of BCMA.

[0659] The invention includes a type of cellular therapy where immune effector cells (e.g., T cells or NK cells) are genetically modified to express a chimeric antigen receptor (CAR) and the BCMA CAR-expressing cell (e.g., BCMA CART or BCMA CAR-expressing NK cell) is infused to a recipient in need thereof. The infused cell is able to kill tumor cells in the recipient. Unlike antibody therapies, CAR-modified cells, e.g., T cells or NK cells, are able to replicate in vivo resulting in long-term persistence that can lead to sustained tumor control. In various aspects, the cells (e.g., T cells or NK cells) administered to the patient, or their progeny, persist in the patient for at least four months, five months, six months, seven months, eight months, nine months, ten months, eleven months, twelve months, thirteen months, fourteen month, fifteen months, sixteen months, seventeen months, eighteen months, nineteen months, twenty months, twenty-one months, twenty-two months, twenty-three months, two years, three years, four years, or five years after administration of the cell (e.g., T cell or NK cell) to the patient.

[0660] The invention also includes a type of cellular therapy where immune effector cells (e.g., T cells or NK cells) are modified, e.g., by in vitro transcribed RNA, to transiently express a chimeric antigen receptor (CAR) and the immune effector cell (e.g., T cell or NK cell) is infused to a recipient in need thereof. The infused cell is able to kill tumor cells in the recipient. Thus, in various aspects, the immune effector cells (e.g., T cells or NK cells) administered to the patient, is present for less than one month, e.g., three weeks, two weeks, one week, after administration of the immune effector cell (e.g., T cell or NK cell) to the patient.

[0661] Without wishing to be bound by any particular theory, the anti-tumor immunity response elicited by the CAR-modified immune effector cells (e.g., T cells or NK cells) may be an active or a passive immune response, or alternatively may be due to a direct vs indirect immune response. In one aspect, the CAR transduced immune effector cells (e.g., T cells or NK cells) exhibit specific proinflammatory cytokine secretion and potent cytolytic activity in response to human cancer cells expressing the BCMA, resist soluble BCMA inhibition, mediate bystander killing and mediate regression of an established human tumor. For example, antigen-less tumor cells within a heterogeneous field of BCMA-expressing tumor may be susceptible to indirect destruction by BCMA-redirected immune effector cells (e.g., T cells or NK cells) that has previously reacted against adjacent antigen-positive cancer cells.

[0662] In one aspect, the fully-human CAR-modified immune effector cells (e.g., T cells or NK cells) of the invention may be a type of vaccine for ex vivo immunization and/or in vivo therapy in a mammal. In one aspect, the mammal is a human.

[0663] With respect to ex vivo immunization, at least one of the following occurs in vitro prior to administering the cell into a mammal: i) expansion of the cells, ii) introducing a nucleic acid encoding a CAR to the cells or iii) cryopreservation of the cells.

[0664] Ex vivo procedures are well known in the art and are discussed more fully below. Briefly, cells are isolated from a mammal (e.g., a human) and genetically modified (i.e., transduced or transfected in vitro) with a vector expressing a CAR disclosed herein. The CAR-modified cell can be administered to a mammalian recipient to provide a therapeutic benefit. The mammalian recipient may be a human and the CAR-modified cell can be autologous with respect to the recipient. Alternatively, the cells can be allogeneic, syngeneic or xenogeneic with respect to the recipient.

[0665] The procedure for ex vivo expansion of hematopoietic stem and progenitor cells is described in U.S. Pat. No. 5,199,942, incorporated herein by reference, can be applied to the cells of the present invention. Other suitable methods are known in the art, therefore the present invention is not limited to any particular method of ex vivo expansion of the cells. Briefly, ex vivo culture and expansion of T cells comprises: (1) collecting CD34+ hematopoietic stem and progenitor cells from a mammal from peripheral blood harvest or bone marrow explants; and (2) expanding such cells ex vivo. In addition to the cellular growth factors described in U.S. Pat. No. 5,199,942, other factors such as flt3-L, IL-1, IL-3 and c-kit ligand, can be used for culturing and expansion of the cells.

[0666] In addition to using a cell-based vaccine in terms of ex vivo immunization, the present invention also provides compositions and methods for in vivo immunization to elicit an immune response directed against an antigen in a patient.

[0667] Generally, the cells activated and expanded as described herein may be utilized in the treatment and prevention of diseases that arise in individuals who are immunocompromised. In particular, the CAR-modified immune effector cells (e.g., T cells or NK cells) of the invention are used in the treatment of diseases, disorders and conditions associated with expression of BCMA. In certain aspects, the cells of the invention are used in the treatment of patients at risk for developing diseases, disorders and conditions associated with expression of BCMA. Thus, the present invention provides methods for the treatment or prevention of diseases, disorders and conditions associated with expression of BCMA comprising administering to a subject in need thereof, a therapeutically effective amount of the CAR-modified immune effector cells (e.g., T cells or NK cells) of the invention.

[0668] In one aspect the CAR-expressing cells (e.g., CART cells or CAR-expressing NK cells) of the inventions may be used to treat a proliferative disease such as a cancer or malignancy or is a precancerous condition such as a myelodysplasia, a myelodysplastic syndrome or a preleukemia. In one aspect, the cancer is a hematolical cancer. Hematological cancer conditions are the types of cancer such as leukemia and malignant lymphoproliferative conditions that affect blood, bone marrow and the lymphatic system. In one aspect, the hematological cancer is a leukemia or a hematological. An example of a disease or disorder associated with BCMA is multiple myeloma (also known as MM) (See Claudio et al., Blood. 2002, 100(6):2175-86; and Novak et al., Blood. 2004, 103(2):689-94). Multiple myeloma, also known as plasma cell myeloma or Kahler's disease, is a cancer characterized by an accumulation of abnormal or malignant plasma B-cells in the bone marrow. Frequently, the cancer cells invade adjacent bone, destroying skeletal structures and resulting in bone pain and fractures. Most cases of myeloma also features the production of a paraprotein (also known as M proteins or myeloma proteins), which is an abnormal immunoglobulin produced in excess by the clonal proliferation of the malignant plasma cells. Blood serum paraprotein levels of more than 30 g/L is diagnostic of multiple myeloma, according to the diagnostic criteria of the International Myeloma Working Group (IMWG) (See Kyle et al. (2009), Leukemia. 23:3-9). Other symptoms or signs of multiple myeloma include reduced kidney function or renal failure, bone lesions, anemia, hypercalcemia, and neurological symptoms.

[0669] Criteria for distinguishing multiple myeloma from other plasma cell proliferative disorders have been established by the International Myeloma Working Group (See Kyle et al. (2009), Leukemia. 23:3-9). All three of the following criteria must be met:
[0670] Clonal bone marrow plasma cells ≧10%
[0671] Present of serum and/or urinary monoclonal protein (except in patients with true non-secretory multiple myeloma)
[0672] Evidence of end-organ damage attributable to the underlying plasma cell proliferative disorder, specifically:
   [0673] Hypercalcemia: serum calcium ≧11.5 mg/100 ml
   [0674] Renal insufficienty: serum creatinine >1.73 mmol/1
   [0675] Anemia: normochromic, normocytic with a hemoglobin value of >2 g/100 ml below the lower limit of normal, or a hemoglobin value <10 g/100 ml
   [0676] Bone lesions: lytic lesions, severe osteopenia, or pathologic fractures.

[0677] Other plasma cell proliferative disorders that can be treated by the compositions and methods described herein include, but are not limited to, asymptomatic myeloma (smoldering multiple myeloma or indolent myeloma), monoclonal gammapathy of undetermined significance (MGUS), Waldenstrom's macroglobulinemia, plasmacytomas (e.g., plasma cell dyscrasia, solitary myeloma, solitary plasmacytoma, extramedullary plasmacytoma, and multiple plasmacytoma), systemic amyloid light chain amyloidosis, and POEMS syndrome (also known as Crow-Fukase syndrome, Takatsuki disease, and PEP syndrome).

[0678] Two staging systems are used in the staging of multiple myeloma: the International Staging System (ISS) (See Greipp et al. (2005), J. Clin. Oncol. 23 (15):3412-3420) and the Durie-Salmon Staging system (DSS) (See Durie et al. (1975), Cancer 36 (3): 842-854). The two staging systems are summarized in the table below:

TABLE 18

| | International Staging System | | Durie-Salmon Staging System | |
|---|---|---|---|---|
| | | Median | | Median |
| Stage | Criteria | survival | Criteria | survival* |
| I | β₂M <3.5 | 62 months | All of the | IA: 62 |
| | mg/l | | following: | months |
| | and serum | | Hemoglobin | IB: 22 |
| | albumin ≧3.5 | | level >10 g/dL | months |
| | g/dL | | Serum calcium, | |
| | | | normal | |
| | | | or <12 mg/dL | |
| | | | Bone x-ray, | |
| | | | normal or 1 | |
| | | | plasmacytoma | |
| | | | only | |
| | | | Low monoclonal | |
| | | | protein | |
| | | | production | |
| | | | (IgG <5 g/dL, | |
| | | | IgA <3 g/dL, | |
| | | | Bence Jones | |
| | | | protein <4 g/dL | |
| | | | per 24 hours | |
| II | Neither stage I or | 44 months | Neither stage I | IIA: 58 |
| | stage III | | or stage III | months |
| | | | | IIB: 354 |
| | | | | months |
| III | β₂M ≧5.5 | 29 months | One or more of | IIIA: 45 |
| | mg/l | | the following: | months |
| | | | Hemogloblin | IIIB: 24 |
| | | | level <8.5 g/dL | months |
| | | | Serum calcium, | |
| | | | normal | |
| | | | or >12 mg/dL | |
| | | | Advanced | |
| | | | osteolytic | |
| | | | lesions | |
| | | | High monoclonal | |
| | | | protein | |
| | | | production | |
| | | | (IgG >7 g/dL, | |
| | | | IgA >5 g/dL, | |
| | | | Bence Jones | |
| | | | protein >12 g/dL | |
| | | | per 24 hours | |

*The Durie-Salmon Staging system also includes a subclassification that designates the status of renal function. The designation of “A” or “B” is added after the stage number, wherein “A” indicates relatively normal renal function (serum creatinine value <2.0 mg/dL), and B indicates abnormal renal function (serum creatinine value >2.0 mg/dL).

[0679] Standard treatment for multiple myeloma and associated diseases includes chemotherapy, stem cell transplant (autologous or allogeneic), radiation therapy, and other drug therapies. Frequently used anti-myeloma drugs include alkylating agents (e.g., bendamustine, cyclophosphamide and melphalan), proteasome inhibitors (e.g., bortezomib), corticosteroids (e.g., dexamethasone and prednisone), and immunomodulators (e.g., thalidomide and lenalidomide or Revlimid®), or any combination thereof. Biphosphonate drugs are also frequently administered in combination with the standard anti-MM treatments to prevent bone loss. Patients older than 65-70 years of age are unlikely candidates for stem cell transplant. In some cases, double-autologous stem cell transplants are options for patients less than 60 years of age with suboptimal response to the first transplant. The compositions and methods of the present invention may be administered in combination with any of the currently prescribed treatments for multiple myeloma.

[0680] Another example of a disease or disorder associated with BCMA is Hodgkin's lymphoma and non-Hodgkin's lymphoma (See Chiu et al., Blood. 2007, 109(2):729-39; He et al., J Immunol. 2004, 172(5):3268-79).

[0681] Hodgkin's lymphoma (HL), also known as Hodgkin's disease, is a cancer of the lymphatic system that originates from white blood cells, or lymphocytes. The abnormal cells that comprise the lymphoma are called Reed-Sternberg cells. In Hodgkin's lymphoma, the cancer spreads from one lymph node group to another. Hodgkin's lymphoma can be subclassified into four pathologic subtypes based upon Reed-Sternberg cell morphology and the cell composition around the Reed-Sternberg cells (as determined through lymph node biopsy): nodular sclerosing HL, mixed-cellularity subtype, lymphocyte-rich or lymphocytic predominance, lymphocyte depleted. Some Hodgkin's lymphoma can also be nodular lymphocyte predominant Hodgkin's lymphoma, or can be unspecified. Symptoms and signs of Hodgkin's lymphoma include painless swelling in the lymph nodes in the neck, armpits, or groin, fever, night sweats, weight loss, fatigue, itching, or abdominal pain.

[0682] Non-Hodgkin's lymphoma (NHL) comprises a diverse group of blood cancers that include any kind of lymphoma other than Hodgkin's lymphoma. Subtypes of non-Hodgkin's lymphoma are classified primarily by cell morphology, chromosomal aberrations, and surface markers. NHL subtypes (or NHL-associated cancers) include B cell lymphomas such as, but not limited to, Burkitt's lymphoma, B-cell chronic lymphocytic leukemia (B-CLL), B-cell prolymphocytic leukemia (B-PLL), chronic lymphocytic leukemia (CLL), diffuse large B-cell lymphoma (DLBCL) (e.g., intravascular large B-cell lymphoma and primary mediastinal B-cell lymphoma), follicular lymphoma (e.g., follicle center lymphoma, follicular small cleaved cell), hair cell leukemia, high grade B-cell lymphoma (Burkitt's like), lymphoplasmacytic lymphoma (Waldenstrom's macroglublinemia), mantle cell lymphoma, marginal zone B-cell lymphomas (e.g., extranodal marginal zone B-cell lymphoma or mucosa-associated lymphoid tissue (MALT) lymphoma, nodal marginal zone B-cell lymphoma, and splenic marginal zone B-cell lymphoma), plasmacytoma/myeloma, precursor B-lymphoblastic leukemia/lymphoma (PB-LBL/L), primary central nervous system (CNS) lymphoma, primary intraocular lymphoma, small lymphocytic lymphoma (SLL); and T cell lymphomas, such as, but not limited to, anaplastic large cell lymphoma (ALCL), adult T-cell lymphoma/leukemia (e.g., smoldering, chronic, acute and lymphomatous), angiocentric lymphoma, angioimmunoblastic T-cell lymphoma, cutaneous T-cell lymphomas (e.g., mycosis fungoides, Sezary syndrome, etc.), extranodal natural killer/T-cell lymphoma (nasal-type), enteropathy type intestinal T-cell lymphoma, large granular lymphocyte leukemia, precursor T-lymphoblastic lymphoma/leukemia (T-LBL/L), T-cell chronic lymphocytic leukemia/prolymphocytic leukemia (T-CLL/PLL), and unspecified peripheral T-cell lymphoma. Symptoms and signs of Hodgkin's lymphoma include painless swelling in the lymph nodes in the neck, armpits, or groin, fever, night sweats, weight loss, fatigue, itching, abdominal pain, coughing, or chest pain.

[0683] The staging is the same for both Hodgkin's and non-Hodgkin's lymphoma, and refers to the extent of spread of the cancer cells within the body. In stage I, the lymphoma cells are in one lymph node group. In stage II, lymphoma cells are present in at least two lymph node groups, but both groups are on the same side of the diaphragm, or in one part of a tissue or organ and the lymph nodes near that organ on the same side of the diaphragm. In stage III, lymphoma cells are in lymph nodes on both sides of the diaphragm, or in one part of a tissue or organ near these lymph node groups or in the spleen. In stage IV, lymphoma cells are found in several parts of at least one organ or tissue, or lymphoma cells are in an organ and in lymph nodes on the other side of the diaphragm. In addition to the Roman numeral staging designation, the stages of can also be described by letters A, B, E, and S, wherein A refers to patients without symptoms, B refers to patients with symptoms, E refers to patients in which lymphoma is found in tissues outside the lymph system, and S refers to patients in which lymphoma is found in the spleen.

[0684] Hodgkin's lymphoma is commonly treated with radiation therapy, chemotherapy, or hematopoietic stem cell transplantation. The most common therapy for non-Hodgkin's lymphoma is R-CHOP, which consists of four different chemotherapies (cyclophosphamide, doxorubicin, vincristine, and prenisolone) and rituximab (Rituxan®). Other therapies commonly used to treat NHL include other chemotherapeutic agents, radiation therapy, stem cell transplantation (autologous or allogeneic bone marrow transplantation), or biological therapy, such as immunotherapy. Other examples of biological therapeutic agents include, but are not limited to, rituximab (Rituxan®), tositumomab (Bexxar®), epratuzumab (LymphoCide®), and alemtuzumab (MabCampath®). The compositions and methods of the present invention may be administered in combination with any of the currently prescribed treatments for Hodgkin's lymphoma or non-Hodgkin's lymphoma.

[0685] BCMA expression has also been associated Waldenstrom's macroglobulinemia (WM), also known as lymphoplasmacytic lymphoma (LPL). (See Elsawa et al., Blood. 2006, 107(7):2882-8). Waldenstrom's macroglobulinemia was previously considered to be related to multiple myeloma, but has more recently been classified as a subtype of non-Hodgkin's lymphoma. WM is characterized by uncontrolled B-cell lymphocyte proliferation, resulting in anemia and production of excess amounts of paraprotein, or immunoglobulin M (IgM), which thickens the blood and results in hyperviscosity syndrome. Other symptoms or signs of WM include fever, night sweats, fatigue, anemia, weight loss, lymphadenopathy or splenomegaly, blurred vision, dizziness, nose bleeds, bleeding gums, unusual bruises, renal impairment or failure, amyloidosis, or peripheral neuropathy.

[0686] Standard treatment for WM consists of chemotherapy, specifically with rituximab (Rituxan®). Other chemotherapeutic drugs can be used in combination, such as chlorambucil (Leukeran®), cyclophosphamide (Neosar®), fludarabine (Fludara®), cladribine (Leustatin®), vincristine, and/or thalidomide. Corticosteriods, such as prednisone, can also be administered in combination with the chemotherapy. Plasmapheresis, or plasma exchange, is commonly used throughout treatment of the patient to alleviate some symptoms by removing the paraprotein from the blood. In some cases, stem cell transplantation is an option for some patients.

[0687] Another example of a disease or disorder associated with BCMA is brain cancer. Specifically, expression of BCMA has been associated with astrocytoma or glioblastoma (See Deshayes et al, Oncogene. 2004, 23(17):3005-12, Pelekanou et al., PLoS One. 2013, 8(12):e83250). Astrocytomas are tumors that arise from astrocytes, which are a type of glial cell in the brain. Glioblastoma (also known as glioblastoma multiforme or GBM) is the most malignant form of astrocytoma, and is considered the most advanced stage of brain cancer (stage IV). There are two variants of glioblastoma: giant cell glioblastoma and gliosarcoma. Other astrocytomas include juvenile pilocytic astrocytoma (JPA), fibrillary astrocytoma, pleomorphic xantroastrocytoma (PXA), desembryoplastic neuroepithelial tumor (DNET), and anaplastic astrocytoma (AA).

[0688] Symptoms or signs associated with glioblastoma or astrocytoma include increased pressure in the brain, headaches, seizures, memory loss, changes in behavior, loss in movement or sensation on one side of the body, language dysfunction, cognitive impairments, visual impairment, nausea, vomiting, and weakness in the arms or legs.

[0689] Surgical removal of the tumor (or resection) is the standard treatment for removal of as much of the glioma as possible without damaging or with minimal damage to the normal, surrounding brain. Radiation therapy and/or chemotherapy are often used after surgery to suppress and slow recurrent disease from any remaining cancer cells or satellite lesions. Radiation therapy includes whole brain radiotherapy (conventional external beam radiation), targeted three-dimensional conformal radiotherapy, and targeted radionuclides. Chemotherapeutic agents commonly used to treat glioblastoma include temozolomide, gefitinib or erlotinib, and cisplatin. Angiogenesis inhibitors, such as Bevacizumab (Avastin®), are also commonly used in combination with chemotherapy and/or radiotherapy.

[0690] Supportive treatment is also frequently used to relieve neurological symptoms and improve neurologic function, and is administered in combination any of the cancer therapies described herein. The primary supportive agents include anticonvulsants and corticosteroids. Thus, the compositions and methods of the present invention may be used in combination with any of the standard or supportive treatments to treat a glioblastoma or astrocytoma.

[0691] Non-cancer related diseases and disorders associated with BCMA expression can also be treated by the compositions and methods disclosed herein. Examples of non-cancer related diseases and disorders associated with BCMA expression include, but are not limited to: viral infections; e.g., HIV, fungal invections, e.g., C. neoformans; irritable bowel disease; ulcerative colitis, and disorders related to mucosal immunity.

[0692] The CAR-modified immune effector cells (e.g., T cells or NK cells) of the present invention may be administered either alone, or as a pharmaceutical composition in combination with diluents and/or with other components such as IL-2 or other cytokines or cell populations.

[0693] The present invention provides for compositions and methods for treating cancer. In one aspect, the cancer is a hematologic cancer including but is not limited to hematolical cancer is a leukemia or a lymphoma. In one aspect, the CAR-expressing cells (e.g., CART cells or CAR-expressing NK cells) of the invention may be used to treat cancers and malignancies such as, but not limited to, e.g., acute leukemias including but not limited to, e.g., B-cell acute lymphoid leukemia (“BALL”), T-cell acute lymphoid leukemia (“TALL”), acute lymphoid leukemia (ALL); one or more chronic leukemias including but not limited to, e.g., chronic myelogenous leukemia (CML), chronic lymphocytic leukemia (CLL); additional hematologic cancers or hematologic conditions including, but not limited to, e.g., B cell prolymphocytic leukemia, blastic plasmacytoid dendritic cell neoplasm, Burkitt's lymphoma, diffuse large B cell lymphoma, Follicular lymphoma, Hairy cell leukemia, small cell- or a large cell-follicular lymphoma, malignant lymphoproliferative conditions, MALT lymphoma, mantle cell lymphoma, Marginal zone lymphoma, multiple myeloma, myelodysplasia and myelodysplastic syndrome, non-Hodgkin's lymphoma, plasmablastic lymphoma, plasmacytoid dendritic cell neoplasm, Waldenstrom macroglobulinemia, and “preleukemia” which are a diverse collection of hematological conditions united by ineffective production (or dysplasia) of myeloid blood cells, and the like. Further a disease associated with BCMA expression includes, but not limited to, e.g., atypical and/or non-classical cancers, malignancies, precancerous conditions or proliferative diseases expressing BCMA.

[0694] In embodiments, a composition described herein can be used to treat a disease including but not limited to a plasma cell proliferative disorder, e.g., asymptomatic myeloma (smoldering multiple myeloma or indolent myeloma), monoclonal gammapathy of undetermined significance (MGUS), Waldenstrom's macroglobulinemia, plasmacytomas (e.g., plasma cell dyscrasia, solitary myeloma, solitary plasmacytoma, extramedullary plasmacytoma, and multiple plasmacytoma), systemic amyloid light chain amyloidosis, and POEMS syndrome (also known as Crow-Fukase syndrome, Takatsuki disease, and PEP syndrome).

[0695] In embodiments, a composition described herein can be used to treat a disease including but not limited to a cancer, e.g., a cancer described herein, e.g., a prostate cancer (e.g., castrate-resistant or therapy-resistant prostate cancer, or metastatic prostate cancer), pancreatic cancer, or lung cancer.

[0696] The present invention also provides methods for inhibiting the proliferation or reducing a BCMA-expressing cell population, the methods comprising contacting a population of cells comprising a BMCA-expressing cell with an anti-BCMA CAR-expressing cell (e.g., BCMA CART cell or BCMA CAR-expressing NK cell) of the invention that binds to the BCMA-expressing cell. In a specific aspect, the present invention provides methods for inhibiting the proliferation or reducing the population of cancer cells expressing BCMA, the methods comprising contacting the BCMA-expressing cancer cell population with an anti-BCMA CAR-expressing cell (e.g., BCMA CART cell or BCMA CAR-expressing NK cell) of the invention that binds to the BCMA-expressing cell. In one aspect, the present invention provides methods for inhibiting the proliferation or reducing the population of cancer cells expressing BCMA, the methods comprising contacting the BMCA-expressing cancer cell population with an anti-BCMA CAR-expressing cell (e.g., BCMA CART cell or BCMA CAR-expressing NK cell) of the invention that binds to the BCMA-expressing cell. In certain aspects, the anti-BCMA CAR-expressing cell (e.g., BCMA CART cell or BCMA CAR-expressing NK cell) of the invention reduces the quantity, number, amount or percentage of cells and/or cancer cells by at least 25%, at least 30%, at least 40%, at least 50%, at least 65%, at least 75%, at least 85%, at least 95%, or at least 99% in a subject with or animal model for myeloid leukemia or another cancer associated with BCMA-expressing cells relative to a negative control. In one aspect, the subject is a human.

[0697] The present invention also provides methods for preventing, treating and/or managing a disease associated with BCMA-expressing cells (e.g., a hematologic cancer or atypical cancer expressing BCMA), the methods comprising administering to a subject in need an anti-BCMA CAR-expressing cell (e.g., BCMA CART cell or BCMA CAR-expressing NK cell) of the invention that binds to the BCMA-expressing cell. In one aspect, the subject is a human. Non-limiting examples of disorders associated with BCMA-expressing cells include viral or fungal infections, and disorders related to mucosal immunity.

[0698] The present invention also provides methods for preventing, treating and/or managing a disease associated with BCMA-expressing cells, the methods comprising administering to a subject in need an anti-BCMA CAR-expressing cell (e.g., BCMA CART cell or BCMA CAR-expressing NK cell) of the invention that binds to the BCMA-expressing cell. In one aspect, the subject is a human.

[0699] The present invention provides methods for preventing relapse of cancer associated with BCMA-expressing cells, the methods comprising administering to a subject in need thereof an anti-BCMA CAR-expressing cell (e.g., BCMA CART cell or BCMA CAR-expressing NK cell) of the invention that binds to the BCMA-expressing cell. In one aspect, the methods comprise administering to the subject in need thereof an effective amount of an anti-BCMA CAR-expressing cell (e.g., BCMA CART cell or BCMA CAR-expressing NK cell) described herein that binds to the BCMA-expressing cell in combination with an effective amount of another therapy.

### Combination Therapies

[0700] A CAR-expressing cell described herein may be used in combination with other known agents and therapies. Administered “in combination”, as used herein, means that two (or more) different treatments are delivered to the subject during the course of the subject's affliction with the disorder, e.g., the two or more treatments are delivered after the subject has been diagnosed with the disorder and before the disorder has been cured or eliminated or treatment has ceased for other reasons. In some embodiments, the delivery of one treatment is still occurring when the delivery of the second begins, so that there is overlap in terms of administration. This is sometimes referred to herein as “simultaneous” or “concurrent delivery”. In other embodiments, the delivery of one treatment ends before the delivery of the other treatment begins. In some embodiments of either case, the treatment is more effective because of combined administration. For example, the second treatment is more effective, e.g., an equivalent effect is seen with less of the second treatment, or the second treatment reduces symptoms to a greater extent, than would be seen if the second treatment were administered in the absence of the first treatment, or the analogous situation is seen with the first treatment. In some embodiments, delivery is such that the reduction in a symptom, or other parameter related to the disorder is greater than what would be observed with one treatment delivered in the absence of the other. The effect of the two treatments can be partially additive, wholly additive, or greater than additive. The delivery can be such that an effect of the first treatment delivered is still detectable when the second is delivered.

[0701] A CAR-expressing cell described herein and the at least one additional therapeutic agent can be administered simultaneously, in the same or in separate compositions, or sequentially. For sequential administration, the CAR-expressing cell described herein can be administered first, and the additional agent can be administered second, or the order of administration can be reversed.

[0702] The CAR therapy and/or other therapeutic agents, procedures or modalities can be administered during periods of active disorder, or during a period of remission or less active disease. The CAR therapy can be administered before the other treatment, concurrently with the treatment, post-treatment, or during remission of the disorder.

[0703] When administered in combination, the CAR therapy and the additional agent (e.g., second or third agent), or all, can be administered in an amount or dose that is higher, lower or the same than the amount or dosage of each agent used individually, e.g., as a monotherapy. In certain embodiments, the administered amount or dosage of the CAR therapy, the additional agent (e.g., second or third agent), or all, is lower (e.g., at least 20%, at least 30%, at least 40%, or at least 50%) than the amount or dosage of each agent used individually, e.g., as a monotherapy. In other embodiments, the amount or dosage of the CAR therapy, the additional agent (e.g., second or third agent), or all, that results in a desired effect (e.g., treatment of cancer) is lower (e.g., at least 20%, at least 30%, at least 40%, or at least 50% lower) than the amount or dosage of each agent used individually, e.g., as a monotherapy, required to achieve the same therapeutic effect.

[0704] In further aspects, a CAR-expressing cell described herein may be used in a treatment regimen in combination with surgery, chemotherapy, radiation, immunosuppressive agents, such as cyclosporin, azathioprine, methotrexate, mycophenolate, and FK506, antibodies, or other immunoablative agents such as CAMPATH, anti-CD3 antibodies or other antibody therapies, cytoxin, fludarabine, cyclosporin, FK506, rapamycin, mycophenolic acid, steroids, FR901228, cytokines, and irradiation. peptide vaccine, such as that described in Izumoto et al. 2008 J Neurosurg 108:963-971.

[0705] In certain instances, compounds of the present invention are combined with other therapeutic agents, such as other anti-cancer agents, anti-allergic agents, anti-nausea agents (or anti-emetics), pain relievers, cytoprotective agents, and combinations thereof.

[0706] In one embodiment, a first CAR-expressing cell described herein, e.g., a BCMA CAR-expressing cell described herein, may be used in combination with a second CAR-expressing cell. In one embodiment, the second CAR-expressing cell expresses a CAR comprising a different anti-BMCA binding domain, e.g., an anti-BCMA binding domain described herein that differs from the anti-BCMA binding domain in the CAR expressed by the first CAR-expressing cell. In one embodiment, the second CAR-expressing cell expresses a CAR comprising an antigen-binding domain that targets an antigen other than BCMA (e.g., CD19, CD20, CS-1, kappa light chain, CD139, Lewis Y antigen, or CD38). In one embodiment, a first CAR-expressing cell described herein, e.g., a BCMA CAR-expressing cell described herein, is used in combination with a second CAR-expressing cell comprising a CD19 CAR. In one embodiment, a BCMA CAR-expressing cell described herein is used in combination with a CD19 CAR-expressing cell to treat a BCMA-associated cancer described herein, e.g., multiple myeloma. In some embodiments, the multiple myeloma is CD19-negative, e.g., having a vast majority (e.g., at least 98%, 99%, 99.5%, 99.9%, or 99.95%) of the neoplastic plasma cells with a CD19-negative phenotype, e.g., as detected flow cytometry, RT-PCR, or both flow cytometry and RT-PCR. As shown in Example 17 herein, a CD19 CAR can be effective even against a CD19-negative multiple myeloma. While not wishing to be bound by theory, the CD19 CAR may act on a small but important CD19-positive population of neoplastic cells, by targeting a cell that expresses levels of CD19 that fall below the detection threshold of the assays described herein, or by targeting a non-neoplastic cell that supports the neoplastic cells. In embodiments, a CD19 CAR can remove B cells, e.g., B regulatory B cells.

[0707] For example, in one embodiment, the first CAR-expressing cell described herein, e.g., a BCMA CAR-expressing cell, and the second CAR-expressing cell described herein, e.g., a CD19 CAR-expressing cell, are prepared in the same composition and are administered simultaneously. In another embodiment, the first CAR-expressing cell described herein, e.g., a BCMA CAR-expressing cell, and the second CAR-expressing cell described herein, e.g., a CD19 CAR-expressing cell, are prepared in separate compositions, and the separate compositions are administered simultaneously or sequentially. When the BCMA CAR-expressing cell and the second CAR-expressing cell are prepared in separate compositions, the BCMA CAR-expressing cell can be administered first, and the second CAR-expressing cell can be administered second, or the order of administration can be reversed.

[0708] In one embodiment, a CD19 CAR is a CD19 CAR, e.g., a humanized CD19 CAR, described in WO2014/153270, filed Mar. 15, 2014 (which is incorporated by reference herein in its entirety) or a sequence at least 95%, e.g., 95-99%, identical thereto. In some embodiments, the CD19 CAR construct is a CAR19 construct provided in PCT publication WO2012/079000 (which is incorporated by reference herein in its entirety) or a sequence at least 95%, e.g., 95-99%, identical thereto. In one embodiment, the anti-CD19 binding domain is a scFv described in WO2012/079000, or a sequence at least 95%, e.g., 95-99%, identical thereto.

[0709] In embodiments, a first CAR-expressing cell is administered to a subject, and a second CAR-expressing cell is administered to the subject. In embodiments, the first CAR-expressing cell comprises a CAR (e.g., BCMA or CD19 CAR) comprising a CD27 costimulatory domain and a CD3zeta (mutant or wild type) primary signaling domain. In embodiments, the second CAR-expressing cell comprises a CAR (e.g., BCMA CAR) comprising a 4-1BB costimulatory domain and a CD3zeta (mutant or wild type) primary signaling domain. Without wishing to be bound by theory, in embodiments, the first CAR-expressing cell can be less toxic than the second CAR-expressing cell and be used to debulk a tumor.

[0710] In one embodiment, a CAR-expressing cell described herein can be used in combination with a chemotherapeutic agent. Exemplary chemotherapeutic agents include an anthracycline (e.g., doxorubicin (e.g., liposomal doxorubicin)), a vinca alkaloid (e.g., vinblastine, vincristine, vindesine, vinorelbine), an alkylating agent (e.g., cyclophosphamide, decarbazine, melphalan, ifosfamide, temozolomide), an immune cell antibody (e.g., alemtuzamab, gemtuzumab, rituximab, tositumomab), an antimetabolite (including, e.g., folic acid antagonists, pyrimidine analogs, purine analogs and adenosine deaminase inhibitors (e.g., fludarabine)), an mTOR inhibitor, a TNFR glucocorticoid induced TNFR related protein (GITR) agonist, a proteasome inhibitor (e.g., aclacinomycin A, gliotoxin or bortezomib), an immunomodulator such as thalidomide or a thalidomide derivative (e.g., lenalidomide).

[0711] General Chemotherapeutic agents considered for use in combination therapies include anastrozole (Arimidex®), bicalutamide (Casodex®), bleomycin sulfate (Blenoxane®), busulfan (Myleran®), busulfan injection (Busulfex®), capecitabine (Xeloda®), N4-pentoxycarbonyl-5-deoxy-5-fluorocytidine, carboplatin (Paraplatin®), carmustine (BiCNU®), chlorambucil (Leukeran®), cisplatin (Platinol®), cladribine (Leustatin®), cyclophosphamide (Cytoxan® or Neosar®), cytarabine, cytosine arabinoside (Cytosar-U®), cytarabine liposome injection (DepoCyt®), dacarbazine (DTIC-Dome®), dactinomycin (Actinomycin D, Cosmegan), daunorubicin hydrochloride (Cerubidine®), daunorubicin citrate liposome injection (DaunoXome®), dexamethasone, docetaxel (Taxotere®), doxorubicin hydrochloride (Adriamycin®, Rubex®), etoposide (Vepesid®), fludarabine phosphate (Fludara®), 5-fluorouracil (Adrucil®, Efudex®), flutamide (Eulexin®), tezacitibine, Gemcitabine (difluorodeoxycitidine), hydroxyurea (Hydrea®), Idarubicin (Idamycin®), ifosfamide (IFEX®), irinotecan (Camptosar®), L-asparaginase (ELSPAR®), leucovorin calcium, melphalan (Alkeran®), 6-mercaptopurine (Purinethol®), methotrexate (Folex®), mitoxantrone (Novantrone®), mylotarg, paclitaxel (Taxol®), phoenix (Yttrium90/MX-DTPA), pentostatin, polifeprosan 20 with carmustine implant (Gliadel®), tamoxifen citrate (Nolvadex®), teniposide (Vumon®), 6-thioguanine, thiotepa, tirapazamine (Tirazone®), topotecan hydrochloride for injection (Hycamptin®), vinblastine (Velban®), vincristine (Oncovin®), and vinorelbine (Navelbine®).

[0712] Anti-cancer agents of particular interest for combinations with the compounds of the present invention include: anthracyclines; alkylating agents; antimetabolites; drugs that inhibit either the calcium dependent phosphatase calcineurin or the p70S6 kinase FK506) or inhibit the p70S6 kinase; mTOR inhibitors; immunomodulators; anthracyclines; vinca alkaloids; proteosome inhibitors; GITR agonists; protein tyrosine phosphatase inhibitors; a CDK4 kinase inhibitor; a BTK inhibitor; a MKN kinase inhibitor; a DGK kinase inhibitor; or an oncolytic virus.

[0713] Exemplary alkylating agents include, without limitation, nitrogen mustards, ethylenimine derivatives, alkyl sulfonates, nitrosoureas and triazenes): uracil mustard (Aminouracil Mustard®, Chlorethaminacil®, Demethyldopan®, Desmethyldopan®, Haemanthamine®, Nordopan®, Uracil nitrogen Mustard®, Uracillost®, Uracilmostaza®, Uramustin®, Uramustine®), chlormethine (Mustargen®), cyclophosphamide (Cytoxan®, Neosar®, Clafen®, Endoxan®, Procytox®, Revimmune™), ifosfamide (Mitoxana®), melphalan (Alkeran®), Chlorambucil (Leukeran®), pipobroman (Amedel®, Vercyte®), triethylenemelamine (Hemel®, Hexalen®, Hexastat®), triethylenethiophosphoramine, Temozolomide (Temodar®), thiotepa (Thioplex®), busulfan (Busilvex®, Myleran®), carmustine (BiCNU®), lomustine (CeeNU®), streptozocin (Zanosar®), and Dacarbazine (DTIC-Dome®). Additional exemplary alkylating agents include, without limitation, Oxaliplatin (Eloxatin®); Temozolomide (Temodar® and Temodal®); Dactinomycin (also known as actinomycin-D, Cosmegen®); Melphalan (also known as L-PAM, L-sarcolysin, and phenylalanine mustard, Alkeran®); Altretamine (also known as hexamethylmelamine (HMM), Hexalen®); Carmustine (BiCNU®); Bendamustine (Treanda®); Busulfan (Busulfex® and Myleran®); Carboplatin (Paraplatin®); Lomustine (also known as CCNU, CeeNU®); Cisplatin (also known as CDDP, Platinol® and Platinol®-AQ); Chlorambucil (Leukeran®); Cyclophosphamide (Cytoxan® and Neosar®); Dacarbazine (also known as DTIC, DIC and imidazole carboxamide, DTIC-Dome®); Altretamine (also known as hexamethylmelamine (HMM), Hexalen®); Ifosfamide (Ifex®); Prednumustine; Procarbazine (Matulane®); Mechlorethamine (also known as nitrogen mustard, mustine and mechloroethamine hydrochloride, Mustargen®); Streptozocin (Zanosar®); Thiotepa (also known as thiophosphoamide, TESPA and TSPA, Thioplex®); Cyclophosphamide (Endoxan®, Cytoxan®, Neosar®, Procytox®, Revimmune®); and Bendamustine HCl (Treanda®).

[0714] Exemplary mTOR inhibitors include, e.g., temsirolimus; ridaforolimus (formally known as deferolimus, (1R,2R,4S)-4-[(2R)-2 [(1R,9S,12S,15R,16E,18R,19R,21R, 23S,24E,26E,28Z,30S,32S,35R)-1,18-dihydroxy-19,30-dimethoxy-15,17,21,23,29,35-hexamethyl-2,3,10,14,20-pentaoxo-11,36-dioxa-4-azatricyclo[30.3.1.0^{4,9}]hexatriaconta-16,24,26,28-tetraen-12-yl]propyl]-2-methoxycyclohexyl dimethylphosphinate, also known as AP23573 and MK8669, and described in PCT Publication No. WO 03/064383); everolimus (Afinitor® or RAD001); rapamycin (AY22989, Sirolimus®); simapimod (CAS 164301-51-3); emsirolimus, (5-{2,4-Bis[(3S)-3-methylmorpholin-4-yl]pyrido[2,3-d]pyrimidin-7-yl}-2-methoxyphenyl)methanol (AZD8055); 2-Amino-8-[trans-4-(2-hydroxyethoxy)cyclohexyl]-6-(6-methoxy-3-pyridinyl)-4-methyl-pyrido[2,3-d]pyrimidin-7(8H)-one (PF04691502, CAS 1013101-36-4); and N²-[1,4-dioxo-[[4-(4-oxo-8-phenyl-4H-1-benzopyran-2-yl)morpholinium-4-yl]methoxy]butyl]-L-arginylglycyl-L-α-aspartylL-serine-(SEQ ID NO: 383), inner salt (SF1126, CAS 936487-67-1), and XL765.

[0715] Exemplary immunomodulators include, e.g., afutuzumab (available from Roche®); pegfilgrastim (Neulasta®); lenalidomide (CC-5013, Revlimid®); thalidomide (Thalomid®), actimid (CC4047); and IRX-2 (mixture of human cytokines including interleukin 1, interleukin 2, and interferon γ, CAS 951209-71-5, available from IRX Therapeutics).

[0716] Exemplary anthracyclines include, e.g., doxorubicin (Adriamycin® and Rubex®); bleomycin (Lenoxane®); daunorubicin (dauorubicin hydrochloride, daunomycin, and rubidomycin hydrochloride, Cerubidine®); daunorubicin liposomal (daunorubicin citrate liposome, DaunoXome®); mitoxantrone (DHAD, Novantrone®); epirubicin (Ellence™); idarubicin (Idamycin®, Idamycin PFS®); mitomycin C (Mutamycin®); geldanamycin; herbimycin; ravidomycin; and desacetylravidomycin.

[0717] Exemplary vinca alkaloids include, e.g., vinorelbine tartrate (Navelbine®), Vincristine (Oncovin®), and Vindesine (Eldisine®)); vinblastine (also known as vinblastine sulfate, vincaleukoblastine and VLB, Alkaban-AQ® and Velban®); and vinorelbine (Navelbine®).

[0718] Exemplary proteosome inhibitors include bortezomib (Velcade®); carfilzomib (PX-171-007, (S)-4-Methyl-N—((S)-1-(((S)-4-methyl-1-((R)-2-methyloxiran-2-yl)-1-oxopentan-2-yl)amino)-1-oxo-3-phenylpropan-2-yl)-2-((S)-2-(2-morpholinoacetamido)-4-phenylbutanamido)-pentanamide); marizomib (NPI-0052); ixazomib citrate (MLN-9708); delanzomib (CEP-18770); and O-Methyl-N-[(2-methyl-5-thiazolyl)carbonyl]-L-seryl-O-methyl-N-[(1S)-2-[(2R)-2-methyl-2-oxiranyl]-2-oxo-1-(phenylmethyl)ethyl]-L-serinamide (ONX-0912).

[0719] In embodiments, a CAR-expressing cell described herein is administered to a subject in combination with fludarabine, cyclophosphamide, and/or rituximab. In embodiments, a CAR-expressing cell described herein is administered to a subject in combination with fludarabine, cyclophosphamide, and rituximab (FCR). In embodiments, the subject has CLL. For example, the subject has a deletion in the short arm of chromosome 17 (del(17p), e.g., in a leukemic cell). In other examples, the subject does not have a del(17p). In embodiments, the subject comprises a leukemic cell comprising a mutation in the immunoglobulin heavy-chain variable-region (IgV_{H}) gene. In other embodiments, the subject does not comprise a leukemic cell comprising a mutation in the immunoglobulin heavy-chain variable-region (IgV_{H}) gene. In embodiments, the fludarabine is administered at a dosage of about 10-50 mg/m² (e.g., about 10-15, 15-20, 20-25, 25-30, 30-35, 35-40, 40-45, or 45-50 mg/m²), e.g., intravenously. In embodiments, the cyclophosphamide is administered at a dosage of about 200-300 mg/m² (e.g., about 200-225, 225-250, 250-275, or 275-300 mg/m²), e.g., intravenously. In embodiments, the rituximab is administered at a dosage of about 400-600 mg/m2 (e.g., 400-450, 450-500, 500-550, or 550-600 mg/m²), e.g., intravenously.

[0720] In embodiments, a CAR-expressing cell described herein is administered to a subject in combination with bendamustine and rituximab. In embodiments, the subject has CLL. For example, the subject has a deletion in the short arm of chromosome 17 (del(17p), e.g., in a leukemic cell). In other examples, the subject does not have a del(17p). In embodiments, the subject comprises a leukemic cell comprising a mutation in the immunoglobulin heavy-chain variable-region (IgV_{H}) gene. In other embodiments, the subject does not comprise a leukemic cell comprising a mutation in the immunoglobulin heavy-chain variable-region (IgV_{H}) gene. In embodiments, the bendamustine is administered at a dosage of about 70-110 mg/m2 (e.g., 70-80, 80-90, 90-100, or 100-110 mg/m2), e.g., intravenously. In embodiments, the rituximab is administered at a dosage of about 400-600 mg/m2 (e.g., 400-450, 450-500, 500-550, or 550-600 mg/m²), e.g., intravenously.

[0721] In embodiments, a CAR-expressing cell described herein is administered to a subject in combination with rituximab, cyclophosphamide, doxorubicine, vincristine, and/or a corticosteroid (e.g., prednisone). In embodiments, a CAR-expressing cell described herein is administered to a subject in combination with rituximab, cyclophosphamide, doxorubicine, vincristine, and prednisone (R-CHOP). In embodiments, the subject has diffuse large B-cell lymphoma (DLBCL). In embodiments, the subject has nonbulky limited-stage DLBCL (e.g., comprises a tumor having a size/diameter of less than 7 cm). In embodiments, the subject is treated with radiation in combination with the R-CHOP. For example, the subject is administered R-CHOP (e.g., 1-6 cycles, e.g., 1, 2, 3, 4, 5, or 6 cycles of R-CHOP), followed by radiation. In some cases, the subject is administered R-CHOP (e.g., 1-6 cycles, e.g., 1, 2, 3, 4, 5, or 6 cycles of R-CHOP) following radiation.

[0722] In embodiments, a CAR-expressing cell described herein is administered to a subject in combination with etoposide, prednisone, vincristine, cyclophosphamide, doxorubicin, and/or rituximab. In embodiments, a CAR-expressing cell described herein is administered to a subject in combination with etoposide, prednisone, vincristine, cyclophosphamide, doxorubicin, and rituximab (EPOCH-R). In embodiments, a CAR-expressing cell described herein is administered to a subject in combination with dose-adjusted EPOCH-R (DA-EPOCH-R). In embodiments, the subject has a B cell lymphoma, e.g., a Myc-rearranged aggressive B cell lymphoma.

[0723] In embodiments, a CAR-expressing cell described herein is administered to a subject in combination with rituximab and/or lenalidomide. Lenalidomide ((RS)-3-(4-Amino-1-oxo 1,3-dihydro-2H-isoindol-2-yl)piperidine-2,6-dione) is an immunomodulator. In embodiments, a CAR-expressing cell described herein is administered to a subject in combination with rituximab and lenalidomide. In embodiments, the subject has follicular lymphoma (FL) or mantle cell lymphoma (MCL). In embodiments, the subject has FL and has not previously been treated with a cancer therapy. In embodiments, lenalidomide is administered at a dosage of about 10-20 mg (e.g., 10-15 or 15-20 mg), e.g., daily. In embodiments, rituximab is administered at a dosage of about 350-550 mg/m² (e.g., 350-375, 375-400, 400-425, 425-450, 450-475, or 475-500 mg/m²), e.g., intravenously.

[0724] In embodiments, a CAR-expressing cell described herein is administered to a subject in combination with brentuximab. Brentuximab is an antibody-drug conjugate of anti-CD30 antibody and monomethyl auristatin E. In embodiments, the subject has Hodgkin's lymphoma (HL), e.g., relapsed or refractory HL. In embodiments, the subject comprises CD30+ HL. In embodiments, the subject has undergone an autologous stem cell transplant (ASCT). In embodiments, the subject has not undergone an ASCT. In embodiments, brentuximab is administered at a dosage of about 1-3 mg/kg (e.g., about 1-1.5, 1.5-2, 2-2.5, or 2.5-3 mg/kg), e.g., intravenously, e.g., every 3 weeks.

[0725] In embodiments, a CAR-expressing cell described herein is administered to a subject in combination with brentuximab and dacarbazine or in combination with brentuximab and bendamustine. Dacarbazine is an alkylating agent with a chemical name of 5-(3,3-Dimethyl-1-triazenyl)imidazole-4-carboxamide. Bendamustine is an alkylating agent with a chemical name of 4-[5-[Bis(2-chloroethyl)amino]-1-methylbenzimidazol-2-yl]butanoic acid. In embodiments, the subject has Hodgkin's lymphoma (HL). In embodiments, the subject has not previously been treated with a cancer therapy. In embodiments, the subject is at least 60 years of age, e.g., 60, 65, 70, 75, 80, 85, or older. In embodiments, dacarbazine is administered at a dosage of about 300-450 mg/m² (e.g., about 300-325, 325-350, 350-375, 375-400, 400-425, or 425-450 mg/m²), e.g., intravenously. In embodiments, bendamustine is administered at a dosage of about 75-125 mg/m2 (e.g., 75-100 or 100-125 mg/m², e.g., about 90 mg/m²), e.g., intravenously. In embodiments, brentuximab is administered at a dosage of about 1-3 mg/kg (e.g., about 1-1.5, 1.5-2, 2-2.5, or 2.5-3 mg/kg), e.g., intravenously, e.g., every 3 weeks.

[0726] In some embodiments, a CAR-expressing cell described herein is administered to a subject in combination with a CD20 inhibitor, e.g., an anti-CD20 antibody (e.g., an anti-CD20 mono- or bispecific antibody) or a fragment thereof. Exemplary anti-CD20 antibodies include but are not limited to rituximab, ofatumumab, ocrelizumab, veltuzumab, obinutuzumab, TRU-015 (Trubion Pharmaceuticals), ocaratuzumab, and Pro131921 (Genentech). See, e.g., Lim et al. Haematologica. 95.1(2010):135-43.

[0727] In some embodiments, the anti-CD20 antibody comprises rituximab. Rituximab is a chimeric mouse/human monoclonal antibody IgG1 kappa that binds to CD20 and causes cytolysis of a CD20 expressing cell, e.g., as described in www.accessdata.fda.gov/drugsatfda_docs/label/2010/103705s53111bl.pdf. In embodiments, a CAR-expressing cell described herein is administered to a subject in combination with rituximab. In embodiments, the subject has CLL or SLL.

[0728] In some embodiments, rituximab is administered intravenously, e.g., as an intravenous infusion. For example, each infusion provides about 500-2000 mg (e.g., about 500-550, 550-600, 600-650, 650-700, 700-750, 750-800, 800-850, 850-900, 900-950, 950-1000, 1000-1100, 1100-1200, 1200-1300, 1300-1400, 1400-1500, 1500-1600, 1600-1700, 1700-1800, 1800-1900, or 1900-2000 mg) of rituximab. In some embodiments, rituximab is administered at a dose of 150 mg/m² to 750 mg/m², e.g., about 150-175 mg/m², 175-200 mg/m², 200-225 mg/m², 225-250 mg/m², 250-300 mg/m², 300-325 mg/m², 325-350 mg/m², 350-375 mg/m², 375-400 mg/m², 400-425 mg/m², 425-450 mg/m², 450-475 mg/m², 475-500 mg/m², 500-525 mg/m², 525-550 mg/m², 550-575 mg/m², 575-600 mg/m², 600-625 mg/m², 625-650 mg/m², 650-675 mg/m², or 675-700 mg/m², where m² indicates the body surface area of the subject. In some embodiments, rituximab is administered at a dosing interval of at least 4 days, e.g., 4, 7, 14, 21, 28, 35 days, or more. For example, rituximab is administered at a dosing interval of at least 0.5 weeks, e.g., 0.5, 1, 2, 3, 4, 5, 6, 7, 8 weeks, or more. In some embodiments, rituximab is administered at a dose and dosing interval described herein for a period of time, e.g., at least 2 weeks, e.g., at least 2, 3, 4, 5, 6, 7, 8, 9, 10, 11, 12, 13, 14, 15, 16, 17, 18, 19, 20 weeks, or greater. For example, rituximab is administered at a dose and dosing interval described herein for a total of at least 4 doses per treatment cycle (e.g., at least 4, 5, 6, 7, 8, 9, 10, 11, 12, 13, 14, 15, 16, or more doses per treatment cycle).

[0729] In some embodiments, the anti-CD20 antibody comprises ofatumumab. Ofatumumab is an anti-CD20 IgG1κ human monoclonal antibody with a molecular weight of approximately 149 kDa. For example, ofatumumab is generated using transgenic mouse and hybridoma technology and is expressed and purified from a recombinant murine cell line (NS0). See, e.g., www.accessdata.fda.gov/drugsatfda_docs/label/2009/1253261bl.pdf; and Clinical Trial Identifier number NCT01363128, NCT01515176, NCT01626352, and NCT01397591. In embodiments, a CAR-expressing cell described herein is administered to a subject in combination with ofatumumab. In embodiments, the subject has CLL or SLL.

[0730] In some embodiments, ofatumumab is administered as an intravenous infusion. For example, each infusion provides about 150-3000 mg (e.g., about 150-200, 200-250, 250-300, 300-350, 350-400, 400-450, 450-500, 500-550, 550-600, 600-650, 650-700, 700-750, 750-800, 800-850, 850-900, 900-950, 950-1000, 1000-1200, 1200-1400, 1400-1600, 1600-1800, 1800-2000, 2000-2200, 2200-2400, 2400-2600, 2600-2800, or 2800-3000 mg) of ofatumumab. In embodiments, ofatumumab is administered at a starting dosage of about 300 mg, followed by 2000 mg, e.g., for about 11 doses, e.g., for 24 weeks. In some embodiments, ofatumumab is administered at a dosing interval of at least 4 days, e.g., 4, 7, 14, 21, 28, 35 days, or more. For example, ofatumumab is administered at a dosing interval of at least 1 week, e.g., 1, 2, 3, 4, 5, 6, 7, 8, 9, 10, 11, 12, 24, 26, 28, 20, 22, 24, 26, 28, 30 weeks, or more. In some embodiments, ofatumumab is administered at a dose and dosing interval described herein for a period of time, e.g., at least 1 week, e.g., 1, 2, 3, 4, 5, 6, 7, 8, 9, 10, 11, 12, 13, 14, 15, 16, 17, 18, 19, 20, 22, 24, 26, 28, 30, 40, 50, 60 weeks or greater, or 1, 2, 3, 4, 5, 6, 7, 8, 9, 10, 11, 12 months or greater, or 1, 2, 3, 4, 5 years or greater. For example, ofatumumab is administered at a dose and dosing interval described herein for a total of at least 2 doses per treatment cycle (e.g., at least 2, 3, 4, 5, 6, 7, 8, 9, 10, 11, 12, 13, 14, 15, 16, 18, 20, or more doses per treatment cycle).

[0731] In some cases, the anti-CD20 antibody comprises ocrelizumab. Ocrelizumab is a humanized anti-CD20 monoclonal antibody, e.g., as described in Clinical Trials Identifier Nos. NCT00077870, NCT01412333, NCT00779220, NCT00673920, NCT01194570, and Kappos et al. Lancet. 19.378(2011):1779-87.

[0732] In some cases, the anti-CD20 antibody comprises veltuzumab. Veltuzumab is a humanized monoclonal antibody against CD20. See, e.g., Clinical Trial Identifier No. NCT00547066, NCT00546793, NCT01101581, and Goldenberg et al. Leuk Lymphoma. 51(5)(2010):747-55.

[0733] In some cases, the anti-CD20 antibody comprises GA101. GA101 (also called obinutuzumab or R05072759) is a humanized and glyco-engineered anti-CD20 monoclonal antibody. See, e.g., Robak. Curr. Opin. Investig. Drugs. 10.6(2009):588-96; Clinical Trial Identifier Numbers: NCT01995669, NCT01889797, NCT02229422, and NCT01414205; and www.accessdatafda.gov/drugsatfda_docs/label/2013/125486s0001b1.pdf.

[0734] In some cases, the anti-CD20 antibody comprises AME-133v. AME-133v (also called LY2469298 or ocaratuzumab) is a humanized IgG1 monoclonal antibody against CD20 with increased affinity for the FcγRIIIa receptor and an enhanced antibody dependent cellular cytotoxicity (ADCC) activity compared with rituximab. See, e.g., Robak et al. BioDrugs 25.1(2011):13-25; and Forero-Torres et al. Clin Cancer Res. 18.5(2012):1395-403.

[0735] In some cases, the anti-CD20 antibody comprises PRO131921. PRO131921 is a humanized anti-CD20 monoclonal antibody engineered to have better binding to FcγRIIIa and enhanced ADCC compared with rituximab. See, e.g., Robak et al. BioDrugs 25.1(2011):13-25; and Casulo et al. Clin Immunol. 154.1(2014):37-46; and Clinical Trial Identifier No. NCT00452127.

[0736] In some cases, the anti-CD20 antibody comprises TRU-015. TRU-015 is an anti-CD20 fusion protein derived from domains of an antibody against CD20. TRU-015 is smaller than monoclonal antibodies, but retains Fc-mediated effector functions. See, e.g., Robak et al. BioDrugs 25.1(2011):13-25. TRU-015 contains an anti-CD20 single-chain variable fragment (scFv) linked to human IgG1 hinge, CH2, and CH3 domains but lacks CH1 and CL domains.

[0737] In some embodiments, an anti-CD20 antibody described herein is conjugated or otherwise bound to a therapeutic agent, e.g., a chemotherapeutic agent (e.g., cytoxan, fludarabine, histone deacetylase inhibitor, demethylating agent, peptide vaccine, anti-tumor antibiotic, tyrosine kinase inhibitor, alkylating agent, anti-microtubule or anti-mitotic agent), anti-allergic agent, anti-nausea agent (or anti-emetic), pain reliever, or cytoprotective agent described herein.

[0738] In embodiments, a CAR-expressing cell described herein is administered to a subject in combination with a B-cell lymphoma 2 (BCL-2) inhibitor (e.g., venetoclax, also called ABT-199 or GDC-0199;) and/or rituximab. In embodiments, a CAR-expressing cell described herein is administered to a subject in combination with venetoclax and rituximab. Venetoclax is a small molecule that inhibits the anti-apoptotic protein, BCL-2. The structure of venetoclax (4-(4-{[2-(4-chlorophenyl)-4,4-dimethylcyclohex-1-en-1-yl]methyl}piperazin-1-yl)-N-({3-nitro-4-[(tetrahydro-2H-pyran-4-ylmethyl)amino]phenyl}sulfonyl)-2-(1H-pyrrolo[2,3-b]pyridin-5-yloxy)benzamide) is shown below.

[chemical structure]

[0739] In embodiments, the subject has CLL. In embodiments, the subject has relapsed CLL, e.g., the subject has previously been administered a cancer therapy. In embodiments, venetoclax is administered at a dosage of about 15-600 mg (e.g., 15-20, 20-50, 50-75, 75-100, 100-200, 200-300, 300-400, 400-500, or 500-600 mg), e.g., daily. In embodiments, rituximab is administered at a dosage of about 350-550 mg/m2 (e.g., 350-375, 375-400, 400-425, 425-450, 450-475, or 475-500 mg/m2), e.g., intravenously, e.g., monthly.

[0740] Without being bound by theory, it is believed that in some cancers, B cells (e.g., B regulatory cells) can suppress T cells. Further, it is believed that a combination of oxiplatin and the B cell depleting agent may reduce tumor size and/or eliminate tumors in a subject. In some embodiments, a CAR-expressing cell described herein (e.g., BCMA CAR) is administered in combination with a B cell depleting agent (e.g., a CD19 CAR-expressing cell, a CD20 CAR-expressing cell, rituximab, ocrelizumab, epratuzumab, or belimumab) and oxiplatin. In embodiments, the cancer cell can be CD19 negative or CD19 positive; or BCMA negative or BMCA positive. In embodiments, a CAR-expressing cell described herein (e.g., BCMA CAR) is administered in combination with a B cell depleting agent and oxiplatin to treat a cancer, e.g., a cancer described herein, e.g., solid cancer, e.g., prostate cancer, pancreatic cancer, or lung cancer.

[0741] In embodiments, a CAR-expressing cell described herein (e.g., BCMA CAR) may deplete B cells (e.g., B cells having a plasma cell-like phenotype, e.g., that express BCMA, CD19, and/or CD20) in a subject. In embodiments, the B cell can be CD19 negative or CD19 positive; or BCMA negative or BMCA positive. In some embodiments, a CAR-expressing cell described herein (e.g., BCMA CAR) is administered in combination with oxiplatin. In embodiments, a CAR-expressing cell described herein is administered in combination with oxiplatin is used to treat a cancer, e.g., solid cancer, e.g., prostate cancer, pancreatic cancer, or lung cancer. In some embodiments, a CAR-expressing cell described herein is administered in combination with an oncolytic virus. In embodiments, oncolytic viruses are capable of selectively replicating in and triggering the death of or slowing the growth of a cancer cell. In some cases, oncolytic viruses have no effect or a minimal effect on non-cancer cells. An oncolytic virus includes but is not limited to an oncolytic adenovirus, oncolytic Herpes Simplex Viruses, oncolytic retrovirus, oncolytic parvovirus, oncolytic vaccinia virus, oncolytic Sinbis virus, oncolytic influenza virus, or oncolytic RNA virus (e.g., oncolytic reovirus, oncolytic Newcastle Disease Virus (NDV), oncolytic measles virus, or oncolytic vesicular stomatitis virus (VSV)).

[0742] In some embodiments, the oncolytic virus is a virus, e.g., recombinant oncolytic virus, described in US2010/0178684 A1, which is incorporated herein by reference in its entirety. In some embodiments, a recombinant oncolytic virus comprises a nucleic acid sequence (e.g., heterologous nucleic acid sequence) encoding an inhibitor of an immune or inflammatory response, e.g., as described in US2010/0178684 A1, incorporated herein by reference in its entirety. In embodiments, the recombinant oncolytic virus, e.g., oncolytic NDV, comprises a pro-apoptotic protein (e.g., apoptin), a cytokine (e.g., GM-CSF, interferon-gamma, interleukin-2 (IL-2), tumor necrosis factor-alpha), an immunoglobulin (e.g., an antibody against ED-B firbonectin), tumor associated antigen, a bispecific adapter protein (e.g., bispecific antibody or antibody fragment directed against NDV HN protein and a T cell co-stimulatory receptor, such as CD3 or CD28; or fusion protein between human IL-2 and single chain antibody directed against NDV HN protein). See, e.g., Zamarin et al. Future Microbiol. 7.3(2012):347-67, incorporated herein by reference in its entirety. In some embodiments, the oncolytic virus is a chimeric oncolytic NDV described in U.S. Pat. No. 8,591,881 B2, US 2012/0122185 A1, or US 2014/0271677 A1, each of which is incorporated herein by reference in their entireties.

[0743] In some embodiments, the oncolytic virus comprises a conditionally replicative adenovirus (CRAd), which is designed to replicate exclusively in cancer cells. See, e.g., Alemany et al. Nature Biotechnol. 18(2000):723-27. In some embodiments, an oncolytic adenovirus comprises one described in Table 1 on page 725 of Alemany et al., incorporated herein by reference in its entirety.

[0744] Exemplary oncolytic viruses include but are not limited to the following:

[0745] Group B Oncolytic Adenovirus (ColoAd1) (PsiOxus Therapeutics Ltd.) (see, e.g., Clinical Trial Identifier: NCT02053220);

[0746] ONCOS-102 (previously called CGTG-102), which is an adenovirus comprising granulocyte-macrophage colony stimulating factor (GM-CSF) (Oncos Therapeutics) (see, e.g., Clinical Trial Identifier: NCT01598129);

[0747] VCN-01, which is a genetically modified oncolytic human adenovirus encoding human PH20 hyaluronidase (VCN Biosciences, S.L.) (see, e.g., Clinical Trial Identifiers: NCT02045602 and NCT02045589);

[0748] Conditionally Replicative Adenovirus ICOVIR-5, which is a virus derived from wild-type human adenovirus serotype 5 (Had5) that has been modified to selectively replicate in cancer cells with a deregulated retinoblastoma/E2F pathway (Institut Català d'Oncologia) (see, e.g., Clinical Trial Identifier: NCT01864759);

[0749] Celyvir, which comprises bone marrow-derived autologous mesenchymal stem cells (MSCs) infected with ICOVIR5, an oncolytic adenovirus (Hospital Infantil Universitario Niño Jesùs, Madrid, Spain/Ramon Alemany) (see, e.g., Clinical Trial Identifier: NCT01844661);

[0750] CG0070, which is a conditionally replicating oncolytic serotype 5 adenovirus (Ad5) in which human E2F-1 promoter drives expression of the essential E1a viral genes, thereby restricting viral replication and cytotoxicity to Rb pathway-defective tumor cells (Cold Genesys, Inc.) (see, e.g., Clinical Trial Identifier: NCT02143804); or

[0751] DNX-2401 (formerly named Delta-24-RGD), which is an adenovirus that has been engineered to replicate selectively in retinoblastoma (Rb)-pathway deficient cells and to infect cells that express certain RGD-binding integrins more efficiently (Clinica Universidad de Navarra, Universidad de Navarra/DNAtrix, Inc.) (see, e.g., Clinical Trial Identifier: NCT01956734).

[0752] In some embodiments, an oncolytic virus described herein is administering by injection, e.g., subcutaneous, intra-arterial, intravenous, intramuscular, intrathecal, or intraperitoneal injection. In embodiments, an oncolytic virus described herein is administered intratumorally, transdermally, transmuco sally, orally, intranasally, or via pulmonary administration.

[0753] In an embodiment, cells expressing a CAR described herein are administered to a subject in combination with a molecule that decreases the Treg cell population. Methods that decrease the number of (e.g., deplete) Treg cells are known in the art and include, e.g., CD25 depletion, cyclophosphamide administration, modulating GITR function. Without wishing to be bound by theory, it is believed that reducing the number of Treg cells in a subject prior to apheresis or prior to administration of a CAR-expressing cell described herein reduces the number of unwanted immune cells (e.g., Tregs) in the tumor microenvironment and reduces the subject's risk of relapse. In one embodiment, a CAR expressing cell described herein is administered to a subject in combination with a a molecule targeting GITR and/or modulating GITR functions, such as a GITR agonist and/or a GITR antibody that depletes regulatory T cells (Tregs). In embodiments, cells expressing a CAR described herein are administered to a subject in combination with cyclophosphamide. In one embodiment, the GITR binding molecules and/or molecules modulating GITR functions (e.g., GITR agonist and/or Treg depleting GITR antibodies) are administered prior to administration of the CAR-expressing cell. For example, in one embodiment, the GITR agonist can be administered prior to apheresis of the cells. In embodiments, cyclophosphamide is administered to the subject prior to administration (e.g., infusion or re-infusion) of the CAR-expressing cell or prior to aphersis of the cells. In embodiments, cyclophosphamide and an anti-GITR antibody are administered to the subject prior to administration (e.g., infusion or re-infusion) of the CAR-expressing cell or prior to apheresis of the cells. In one embodiment, the subject has cancer (e.g., a solid cancer or a hematological cancer such as multiple myeloma, ALL or CLL). In an embodiment, the subject has CLL. In embodiments, the subject has multiple myeloma. In embodiments, the subject has a solid cancer, e.g., a solid cancer described herein. Exemplary GITR agonists include, e.g., GITR fusion proteins and anti-GITR antibodies (e.g., bivalent anti-GITR antibodies) such as, e.g., a GITR fusion protein described in U.S. Pat. No. 6,111,090, European Patent No.: 090505B1, U.S. Pat. No. 8,586,023, PCT Publication Nos.: WO 2010/003118 and 2011/090754, or an anti-GITR antibody described, e.g., in U.S. Pat. No. 7,025,962, European Patent No.: 1947183B1, U.S. Pat. No. 7,812,135, U.S. Pat. No. 8,388,967, U.S. Pat. No. 8,591,886, European Patent No.: EP 1866339, PCT Publication No.: WO 2011/028683, PCT Publication No.: WO 2013/039954, PCT Publication No.: WO2005/007190, PCT Publication No.: WO 2007/133822, PCT Publication No.: WO2005/055808, PCT Publication No.: WO 99/40196, PCT Publication No.: WO 2001/03720, PCT Publication No.: WO99/20758, PCT Publication No.: WO2006/083289, PCT Publication No.: WO 2005/115451, U.S. Pat. No. 7,618,632, and PCT Publication No.: WO 2011/051726.

[0754] In one embodiment, a CAR expressing cell described herein is administered to a subject in combination with an mTOR inhibitor, e.g., an mTOR inhibitor described herein, e.g., a rapalog such as everolimus. In one embodiment, the mTOR inhibitor is administered prior to the CAR-expressing cell. For example, in one embodiment, the mTOR inhibitor can be administered prior to apheresis of the cells.

[0755] In one embodiment, a CAR expressing cell described herein is administered to a subject in combination with a GITR agonist, e.g., a GITR agonist described herein. In one embodiment, the GITR agonist is administered prior to the CAR-expressing cell. For example, in one embodiment, the GITR agonist can be administered prior to apheresis of the cells.

[0756] In one embodiment, a CAR expressing cell described herein is administered to a subject in combination with a protein tyrosine phosphatase inhibitor, e.g., a protein tyrosine phosphatase inhibitor described herein. In one embodiment, the protein tyrosine phosphatase inhibitor is an SHP-1 inhibitor, e.g., an SHP-1 inhibitor described herein, such as, e.g., sodium stibogluconate. In one embodiment, the protein tyrosine phosphatase inhibitor is an SHP-2 inhibitor.

[0757] In one embodiment, a CAR-expressing cell described herein can be used in combination with a kinase inhibitor. In one embodiment, the kinase inhibitor is a CDK4 inhibitor, e.g., a CDK4 inhibitor described herein, e.g., a CDK4/6 inhibitor, such as, e.g., 6-Acetyl-8-cyclopentyl-5-methyl-2-(5-piperazin-1-yl-pyridin-2-ylamino)-8H-pyrido[2,3-d]pyrimidin-7-one, hydrochloride (also referred to as palbociclib or PD0332991). In one embodiment, the kinase inhibitor is a BTK inhibitor, e.g., a BTK inhibitor described herein, such as, e.g., ibrutinib. In one embodiment, the kinase inhibitor is an mTOR inhibitor, e.g., an mTOR inhibitor described herein, such as, e.g., rapamycin, a rapamycin analog, OSI-027. The mTOR inhibitor can be, e.g., an mTORC1 inhibitor and/or an mTORC2 inhibitor, e.g., an mTORC1 inhibitor and/or mTORC2 inhibitor described herein. In one embodiment, the kinase inhibitor is a MNK inhibitor, e.g., a MNK inhibitor described herein, such as, e.g., 4-amino-5-(4-fluoroanilino)-pyrazolo[3,4-d]pyrimidine. The MNK inhibitor can be, e.g., a MNK1a, MNK1b, MNK2a and/or MNK2b inhibitor. In one embodiment, the kinase inhibitor is a dual PI3K/mTOR inhibitor described herein, such as, e.g., PF-04695102. In one embodiment, the kinase inhibitor is a DGK inhibitor, e.g., a DGK inhibitor described herein, such as, e.g., DGKinh1 (D5919) or DGKinh2 (D5794).

[0758] In one embodiment, the kinase inhibitor is a CDK4 inhibitor selected from aloisine A; flavopiridol or HMR-1275, 2-(2-chlorophenyl)-5,7-dihydroxy-8-[(3S,4R)-3-hydroxy-1-methyl-4-piperidinyl]-4-chromenone; crizotinib (PF-02341066; 2-(2-Chlorophenyl)-5,7-dihydroxy-8-[(2R,3S)-2-(hydroxymethyl)-1-methyl-3-pyrrolidinyl]-4H-1-benzopyran-4-one, hydrochloride (P276-00); 1-methyl-5-[[2-[5-(trifluoromethyl)-1H-imidazol-2-yl]-4-pyridinyl]oxy]-N-[4-(trifluoromethyl)phenyl]-1H-benzimidazol-2-amine (RAF265); indisulam (E7070); roscovitine (CYC202); palbociclib (PD0332991); dinaciclib (SCH727965); N-[5-[[(5-tert-butyloxazol-2-yl)methyl]thio]thiazol-2-yl]piperidine-4-carboxamide (BMS 387032); 4-[[9-chloro-7-(2,6-difluorophenyl)-5H-pyrimido[5,4-d][2]benzazepin-2-yl]amino]-benzoic acid (MLN8054); 5-[3-(4,6-difluoro-1H-benzimidazol-2-yl)-1H-indazol-5-yl]-N-ethyl-4-methyl-3-pyridinemethanamine (AG-024322); 4-(2,6-dichlorobenzoylamino)-1H-pyrazole-3-carboxylic acid N-(piperidin-4-yl)amide (AT7519); 4-[2-methyl-1-(1-methylethyl)-1H-imidazol-5-yl]-N-[4-(methylsulfonyl)phenyl]-2-pyrimidinamine (AZD5438); and XL281 (BMS908662).

[0759] In one embodiment, the kinase inhibitor is a CDK4 inhibitor, e.g., palbociclib (PD0332991), and the palbociclib is administered at a dose of about 50 mg, 60 mg, 70 mg, 75 mg, 80 mg, 90 mg, 100 mg, 105 mg, 110 mg, 115 mg, 120 mg, 125 mg, 130 mg, 135 mg (e.g., 75 mg, 100 mg or 125 mg) daily for a period of time, e.g., daily for 14-21 days of a 28 day cycle, or daily for 7-12 days of a 21 day cycle. In one embodiment, 1, 2, 3, 4, 5, 6, 7, 8, 9, 10, 11, 12 or more cycles of palbociclib are administered.

[0760] In embodiments, a CAR-expressing cell described herein is administered to a subject in combination with a cyclin-dependent kinase (CDK) 4 or 6 inhibitor, e.g., a CDK4 inhibitor or a CDK6 inhibitor described herein. In embodiments, a CAR-expressing cell described herein is administered to a subject in combination with a CDK4/6 inhibitor (e.g., an inhibitor that targets both CDK4 and CDK6), e.g., a CDK4/6 inhibitor described herein. In an embodiment, the subject has MCL. MCL is an aggressive cancer that is poorly responsive to currently available therapies, i.e., essentially incurable. In many cases of MCL, cyclin D1 (a regulator of CDK4/6) is expressed (e.g., due to chromosomal translocation involving immunoglobulin and Cyclin D1 genes) in MCL cells. Thus, without being bound by theory, it is thought that MCL cells are highly sensitive to CDK4/6 inhibition with high specificity (i.e., minimal effect on normal immune cells). CDK4/6 inhibitors alone have had some efficacy in treating MCL, but have only achieved partial remission with a high relapse rate. An exemplary CDK4/6 inhibitor is LEE011 (also called ribociclib), the structure of which is shown below.

[chemical structure]

[0761] Without being bound by theory, it is believed that administration of a CAR-expressing cell described herein with a CDK4/6 inhibitor (e.g., LEE011 or other CDK4/6 inhibitor described herein) can achieve higher responsiveness, e.g., with higher remission rates and/or lower relapse rates, e.g., compared to a CDK4/6 inhibitor alone.

[0762] In one embodiment, the kinase inhibitor is a BTK inhibitor selected from ibrutinib (PCI-32765); GDC-0834; RN-486; CGI-560; CGI-1764; HM-71224; CC-292; ONO-4059; CNX-774; and LFM-A13. In a preferred embodiment, the BTK inhibitor does not reduce or inhibit the kinase activity of interleukin-2-inducible kinase (ITK), and is selected from GDC-0834; RN-486; CGI-560; CGI-1764; HM-71224; CC-292; ONO-4059; CNX-774; and LFM-A13.

[0763] In one embodiment, the kinase inhibitor is a BTK inhibitor, e.g., ibrutinib (PCI-32765). In embodiments, a CAR-expressing cell described herein is administered to a subject in combination with a BTK inhibitor (e.g., ibrutinib). In embodiments, a CAR-expressing cell described herein is administered to a subject in combination with ibrutinib (also called PCI-32765). The structure of ibrutinib (1-[(3R)-3-[4-Amino-3-(4-phenoxyphenyl)-1H-pyrazolo[3,4-d]pyrimidin-1-yl]piperidin-1-yl]prop-2-en-1-one) is shown below.

[chemical structure]

[0764] In embodiments, the subject has CLL, mantle cell lymphoma (MCL), or small lymphocytic lymphoma (SLL). For example, the subject has a deletion in the short arm of chromosome 17 (del(17p), e.g., in a leukemic cell). In other examples, the subject does not have a del(17p). In embodiments, the subject has relapsed CLL or SLL, e.g., the subject has previously been administered a cancer therapy (e.g., previously been administered one, two, three, or four prior cancer therapies). In embodiments, the subject has refractory CLL or SLL. In other embodiments, the subject has follicular lymphoma, e.g., relapse or refractory follicular lymphoma. In some embodiments, ibrutinib is administered at a dosage of about 300-600 mg/day (e.g., about 300-350, 350-400, 400-450, 450-500, 500-550, or 550-600 mg/day, e.g., about 420 mg/day or about 560 mg/day), e.g., orally. In embodiments, the ibrutinib is administered at a dose of about 250 mg, 300 mg, 350 mg, 400 mg, 420 mg, 440 mg, 460 mg, 480 mg, 500 mg, 520 mg, 540 mg, 560 mg, 580 mg, 600 mg (e.g., 250 mg, 420 mg or 560 mg) daily for a period of time, e.g., daily for 21 day cycle cycle, or daily for 28 day cycle. In one embodiment, 1, 2, 3, 4, 5, 6, 7, 8, 9, 10, 11, 12 or more cycles of ibrutinib are administered. In some embodiments, ibrutinib is administered in combination with rituximab. See, e.g., Burger et al. (2013) Ibrutinib In Combination With Rituximab (iR) Is Well Tolerated and Induces a High Rate Of Durable Remissions In Patients With High-Risk Chronic Lymphocytic Leukemia (CLL): New, Updated Results Of a Phase II Trial In 40 Patients, Abstract 675 presented at 55^{th} ASH Annual Meeting and Exposition, New Orleans, La. 7-10 December Without being bound by theory, it is thought that the addition of ibrutinib enhances the T cell proliferative response and may shift T cells from a T-helper-2 (Th2) to T-helper-1 (Th1) phenotype. Th1 and Th2 are phenotypes of helper T cells, with Th1 versus Th2 directing different immune response pathways. A Th1 phenotype is associated with proinflammatory responses, e.g., for killing cells, such as intracellular pathogens/viruses or cancerous cells, or perpetuating autoimmune responses. A Th2 phenotype is associated with eosinophil accumulation and anti-inflammatory responses.

[0765] In some embodiments of the methods, uses, and compositions herein, the BTK inhibitor is a BTK inhibitor described in International Application WO/2015/079417, which is herein incorporated by reference in its entirety. For instance, in some embodiments, the BTK inhibitor is a compound of formula (I) or a pharmaceutically acceptable salt thereof;

[chemical structure]

[0766] wherein,

[0767] R1 is hydrogen, C1-C6 alkyl optionally substituted by hydroxy;

[0768] R2 is hydrogen or halogen;

[0769] R3 is hydrogen or halogen;

[0770] R4 is hydrogen;

[0771] R5 is hydrogen or halogen;

[0772] or R4 and R5 are attached to each other and stand for a bond, —CH2-, —CH2-CH2-, —CH═CH—, —CH═CH—CH2-; —CH2-CH═CH—; or —CH2-CH2-CH2-;

[0773] R6 and R7 stand independently from each other for H, C1-C6 alkyl optionally substituted by hydroxyl, C3-C6 cycloalkyl optionally substituted by halogen or hydroxy, or halogen;

[0774] R8, R9, R, R′, R10 and R11 independently from each other stand for H, or C1-C6 alkyl optionally substituted by C1-C6 alkoxy; or any two of R8, R9, R, R′, R10 and R11 together with the carbon atom to which they are bound may form a 3-6 membered saturated carbocyclic ring;

[0775] R12 is hydrogen or C1-C6 alkyl optionally substituted by halogen or C1-C6 alkoxy;

[0776] or R12 and any one of R8, R9, R, R′, R10 or R11 together with the atoms to which they are bound may form a 4, 5, 6 or 7 membered azacyclic ring, which ring may optionally be substituted by halogen, cyano, hydroxyl, C1-C6 alkyl or C1-C6 alkoxy;

[0777] n is 0 or 1; and

[0778] R13 is C2-C6 alkenyl optionally substituted by C1-C6 alkyl, C1-C6 alkoxy or N,N-di-C1-C6 alkyl amino; C2-C6 alkynyl optionally substituted by C1-C6 alkyl or C1-C6 alkoxy; or C2-C6 alkylenyl oxide optionally substituted by C1-C6 alkyl.

[0779] In some embodiments, the BTK inhibitor of Formula I is chosen from: N-(3-(5-((1-Acryloylazetidin-3-yl)oxy)-6-aminopyrimidin-4-yl)-5-fluoro-2-methylphenyl)-4-cyclopropyl-2-fluorobenzamide; (E)-N-(3-(6-Amino-5-((1-(but-2-enoyl)azetidin-3-yl)oxy)pyrimidin-4-yl)-5-fluoro-2-methylphenyl)-4-cyclopropyl-2-fluorobenzamide; N-(3-(6-Amino-5-((1-propioloylazetidin-3-yl)oxy)pyrimidin-4-yl)-5-fluoro-2-methylphenyl)-4-cyclopropyl-2-fluorobenzamide; N-(3-(6-Amino-5-((1-(but-2-ynoyl)azetidin-3-yl)oxy)pyrimidin-4-yl)-5-fluoro-2-methylphenyl)-4-cyclopropyl-2-fluorobenzamide; N-(3-(5-((1-Acryloylpiperidin-4-yl)oxy)-6-aminopyrimidin-4-yl)-5-fluoro-2-methylphenyl)-4-cyclopropyl-2-fluorobenzamide; N-(3-(6-Amino-5-(2-(N-methylacrylamido)ethoxy)pyrimidin-4-yl)-5-fluoro-2-methylphenyl)-4-cyclopropyl-2-fluorobenzamide; (E)-N-(3-(6-Amino-5-(2-(N-methylbut-2-enamido)ethoxy)pyrimidin-4-yl)-5-fluoro-2-methylphenyl)-4-cyclopropyl-2-fluorobenzamide; N-(3-(6-Amino-5-(2-(N-methylpropiolamido)ethoxy)pyrimidin-4-yl)-5-fluoro-2-methylphenyl)-4-cyclopropyl-2-fluorobenzamide; (E)-N-(3-(6-Amino-5-(2-(4-methoxy-N-methylbut-2-enamido)ethoxy)pyrimidin-4-yl)-5-fluoro-2-methylphenyl)-4-cyclopropyl-2-fluorobenzamide; N-(3-(6-Amino-5-(2-(N-methylbut-2-ynamido)ethoxy)pyrimidin-4-yl)-5-fluoro-2-methylphenyl)-4-cyclopropyl-2-fluorobenzamide; N-(2-((4-Amino-6-(3-(4-cyclopropyl-2-fluorobenzamido)-5-fluoro-2-methylphenyl)pyrimidin-5-yl)oxy)ethyl)-N-methyloxirane-2-carboxamide; N-(2-((4-Amino-6-(3-(6-cyclopropyl-8-fluoro-1-oxoisoquinolin-2(1H)-yl)phenyl)pyrimidin-5-yl)oxy)ethyl)-N-methylacrylamide; N-(3-(5-(2-Acrylamidoethoxy)-6-aminopyrimidin-4-yl)-5-fluoro-2-methylphenyl)-4-cyclopropyl-2-fluorobenzamide; N-(3-(6-Amino-5-(2-(N-ethylacrylamido)ethoxy)pyrimidin-4-yl)-5-fluoro-2-methylphenyl)-4-cyclopropyl-2-fluorobenzamide; N-(3-(6-Amino-5-(2-(N-(2-fluoroethyl)acrylamido)ethoxy)pyrimidin-4-yl)-5-fluoro-2-methylphenyl)-4-cyclopropyl-2-fluorobenzamide; N-(3-(5-((1-Acrylamidocyclopropyl)methoxy)-6-aminopyrimidin-4-yl)-5-fluoro-2-methylphenyl)-4-cyclopropyl-2-fluorobenzamide; (S)—N-(3-(5-(2-Acrylamidopropoxy)-6-aminopyrimidin-4-yl)-5-fluoro-2-methylphenyl)-4-cyclopropyl-2-fluorobenzamide; (S)—N-(3-(6-Amino-5-(2-(but-2-ynamido)propoxy)pyrimidin-4-yl)-5-fluoro-2-methylphenyl)-4-cyclopropyl-2-fluorobenzamide; (S)—N-(3-(6-Amino-5-(2-(N-methylacrylamido)propoxy)pyrimidin-4-yl)-5-fluoro-2-methylphenyl)-4-cyclopropyl-2-fluorobenzamide; (S)—N-(3-(6-Amino-5-(2-(N-methylbut-2-ynamido)propoxy)pyrimidin-4-yl)-5-fluoro-2-methylphenyl)-4-cyclopropyl-2-fluorobenzamide; N-(3-(6-Amino-5-(3-(N-methylacrylamido)propoxy)pyrimidin-4-yl)-5-fluoro-2-methylphenyl)-4-cyclopropyl-2-fluorobenzamide; (S)—N-(3-(5-((1-Acryloylpyrrolidin-2-yl)methoxy)-6-aminopyrimidin-4-yl)-5-fluoro-2-methylphenyl)-4-cyclopropyl-2-fluorobenzamide; (S)—N-(3-(6-Amino-5-((1-(but-2-ynoyl)pyrrolidin-2-yl)methoxy)pyrimidin-4-yl)-5-fluoro-2-methylphenyl)-4-cyclopropyl-2-fluorobenzamide; (S)-2-(3-(5-((1-Acryloylpyrrolidin-2-yl)methoxy)-6-aminopyrimidin-4-yl)-5-fluoro-2-(hydroxymethyl)phenyl)-6-cyclopropyl-3,4-dihydroisoquinolin-1(2H)-one; N-(2-((4-Amino-6-(3-(6-cyclopropyl-1-oxo-3,4-dihydroisoquinolin-2(1H)-yl)-5-fluoro-2-(hydroxymethyl)phenyl)pyrimidin-5-yl)oxy)ethyl)-N-methylacrylamide; N-(3-(5-(((2S,4R)-1-Acryloyl-4-methoxypyrrolidin-2-yl)methoxy)-6-aminopyrimidin-4-yl)-5-fluoro-2-methylphenyl)-4-cyclopropyl-2-fluorobenzamide; N-(3-(6-Amino-5-(((2S,4R)-1-(but-2-ynoyl)-4-methoxypyrrolidin-2-yl)methoxy)pyrimidin-4-yl)-5-fluoro-2-methylphenyl)-4-cyclopropyl-2-fluorobenzamide; 2-(3-(5-(((2S,4R)-1-Acryloyl-4-methoxypyrrolidin-2-yl)methoxy)-6-aminopyrimidin-4-yl)-5-fluoro-2-(hydroxymethyl)phenyl)-6-cyclopropyl-3,4-dihydroisoquinolin-1(2H)-one; N-(3-(5-(((2S,4S)-1-Acryloyl-4-methoxypyrrolidin-2-yl)methoxy)-6-aminopyrimidin-4-yl)-5-fluoro-2-methylphenyl)-4-cyclopropyl-2-fluorobenzamide; N-(3-(6-Amino-5-(((2S,4S)-1-(but-2-ynoyl)-4-methoxypyrrolidin-2-yl)methoxy)pyrimidin-4-yl)-5-fluoro-2-methylphenyl)-4-cyclopropyl-2-fluorobenzamide; N-(3-(5-(((2S,4R)-1-Acryloyl-4-fluoropyrrolidin-2-yl)methoxy)-6-aminopyrimidin-4-yl)-5-fluoro-2-methylphenyl)-4-cyclopropyl-2-fluorobenzamide; N-(3-(6-Amino-5-(((2S,4R)-1-(but-2-ynoyl)-4-fluoropyrrolidin-2-yl)methoxy)pyrimidin-4-yl)-5-fluoro-2-methylphenyl)-4-cyclopropyl-2-fluorobenzamide; (S)—N-(3-(5-((1-Acryloylazetidin-2-yl)methoxy)-6-aminopyrimidin-4-yl)-5-fluoro-2-methylphenyl)-4-cyclopropyl-2-fluorobenzamide; (S)—N-(3-(6-Amino-5-((1-propioloylazetidin-2-yl)methoxy)pyrimidin-4-yl)-5-fluoro-2-methylphenyl)-4-cyclopropyl-2-fluorobenzamide; (S)-2-(3-(5-((1-Acryloylazetidin-2-yl)methoxy)-6-aminopyrimidin-4-yl)-5-fluoro-2-(hydroxymethyl)phenyl)-6-cyclopropyl-3,4-dihydroisoquinolin-1(2H)-one; (R)—N-(3-(5-((1-Acryloylazetidin-2-yl)methoxy)-6-aminopyrimidin-4-yl)-5-fluoro-2-methylphenyl)-4-cyclopropyl-2-fluorobenzamide; (R)—N-(3-(5-((1-Acryloylpiperidin-3-yl)methoxy)-6-aminopyrimidin-4-yl)-5-fluoro-2-methylphenyl)-4-cyclopropyl-2-fluorobenzamide; N-(3-(5-(((2R,3S)-1-Acryloyl-3-methoxypyrrolidin-2-yl)methoxy)-6-aminopyrimidin-4-yl)-5-fluoro-2-methylphenyl)-4-cyclopropyl-2-fluorobenzamide; N-(3-(5-(((2S,4R)-1-Acryloyl-4-cyanopyrrolidin-2-yl)methoxy)-6-aminopyrimidin-4-yl)-5-fluoro-2-methylphenyl)-4-cyclopropyl-2-fluorobenzamide; or N-(3-(5-(((2S,4S)-1-Acryloyl-4-cyanopyrrolidin-2-yl)methoxy)-6-aminopyrimidin-4-yl)-5-fluoro-2-methylphenyl)-4-cyclopropyl-2-fluorobenzamide.

[0780] Unless otherwise provided, the chemical terms used above in describing the BTK inhibitor of Formula I are used according to their meanings as set out in International Application WO/2015/079417, which is herein incorporated by reference in its entirety.

[0781] In one embodiment, the kinase inhibitor is an mTOR inhibitor selected from temsirolimus; ridaforolimus (1R,2R,4S)-4-[(2R)-2 [(1R,9S,12S,15R,16E,18R,19R,21R, 23S,24E,26E,28Z,30S,32S,35R)-1,18-dihydroxy-19,30-dimethoxy-15,17,21,23,29,35-hexamethyl-2,3,10,14,20-pentaoxo-11,36-dioxa-4-azatricyclo[30.3.1.0^{4,9}]hexatriaconta-16,24,26,28-tetraen-12-yl]propyl]-2-methoxycyclohexyl dimethylphosphinate, also known as AP23573 and MK8669; everolimus (RAD001); rapamycin (AY22989); simapimod; (5-{2,4-bis[(3S)-3-methylmorpholin-4-yl]pyrido[2,3-d]pyrimidin-7-yl}-2-methoxyphenyl)methanol (AZD8055); 2-amino-8-[trans-4-(2-hydroxyethoxy)cyclohexyl]-6-(6-methoxy-3-pyridinyl)-4-methyl-pyrido[2,3-d]pyrimidin-7(8H)-one (PF04691502); and N²-[1,4-dioxo-4-[[4-(4-oxo-8-phenyl-4H-1-benzopyran-2-yl)morpholinium-4-yl]methoxy]butyl]-L-arginylglycyl-L-α-aspartylL-serine-(SEQ ID NO: 383), inner salt (SF1126); and XL765.

[0782] In one embodiment, the kinase inhibitor is an mTOR inhibitor, e.g., rapamycin, and the rapamycin is administered at a dose of about 3 mg, 4 mg, 5 mg, 6 mg, 7 mg, 8 mg, 9 mg, 10 mg (e.g., 6 mg) daily for a period of time, e.g., daily for 21 day cycle cycle, or daily for 28 day cycle. In one embodiment, 1, 2, 3, 4, 5, 6, 7, 8, 9, 10, 11, 12 or more cycles of rapamycin are administered. In one embodiment, the kinase inhibitor is an mTOR inhibitor, e.g., everolimus and the everolimus is administered at a dose of about 2 mg, 2.5 mg, 3 mg, 4 mg, 5 mg, 6 mg, 7 mg, 8 mg, 9 mg, 10 mg, 11 mg, 12 mg, 13 mg, 14 mg, 15 mg (e.g., 10 mg) daily for a period of time, e.g., daily for 28 day cycle. In one embodiment, 1, 2, 3, 4, 5, 6, 7, 8, 9, 10, 11, 12 or more cycles of everolimus are administered.

[0783] In one embodiment, the kinase inhibitor is an MNK inhibitor selected from CGP052088; 4-amino-3-(p-fluorophenylamino)-pyrazolo[3,4-d]pyrimidine (CGP57380); cercosporamide; ETC-1780445-2; and 4-amino-5-(4-fluoroanilino)-pyrazolo[3,4-d]pyrimidine.

[0784] In embodiments, a CAR-expressing cell described herein is administered to a subject in combination with a phosphoinositide 3-kinase (PI3K) inhibitor (e.g., a PI3K inhibitor described herein, e.g., idelalisib or duvelisib) and/or rituximab. In embodiments, a CAR-expressing cell described herein is administered to a subject in combination with idelalisib and rituximab. In embodiments, a CAR-expressing cell described herein is administered to a subject in combination with duvelisib and rituximab. Idelalisib (also called GS-1101 or CAL-101; Gilead) is a small molecule that blocks the delta isoform of PI3K. The structure of idelalisib (5-Fluoro-3-phenyl-2-[(1S)-1-(7H-purin-6-ylamino)propyl]-4(3H)-quinazolinone) is shown below.

[chemical structure]

[0785] Duvelisib (also called IPI-145; Infinity Pharmaceuticals and Abbvie) is a small molecule that blocks PI3K-δ,γ. The structure of duvelisib (8-Chloro-2-phenyl-3-[(1S)-1-(9H-purin-6-ylamino)ethyl]-1(2H)-isoquinolinone) is shown below.

[chemical structure]

[0786] In embodiments, the subject has CLL. In embodiments, the subject has relapsed CLL, e.g., the subject has previously been administered a cancer therapy (e.g., previously been administered an anti-CD20 antibody or previously been administered ibrutinib). For example, the subject has a deletion in the short arm of chromosome 17 (del(17p), e.g., in a leukemic cell). In other examples, the subject does not have a del(17p). In embodiments, the subject comprises a leukemic cell comprising a mutation in the immunoglobulin heavy-chain variable-region (IgV_{H}) gene. In other embodiments, the subject does not comprise a leukemic cell comprising a mutation in the immunoglobulin heavy-chain variable-region (IgV_{H}) gene. In embodiments, the subject has a deletion in the long arm of chromosome 11 (del(11q)). In other embodiments, the subject does not have a del(11q). In embodiments, idelalisib is administered at a dosage of about 100-400 mg (e.g., 100-125, 125-150, 150-175, 175-200, 200-225, 225-250, 250-275, 275-300, 325-350, 350-375, or 375-400 mg), e.g., BID. In embodiments, duvelisib is administered at a dosage of about 15-100 mg (e.g., about 15-25, 25-50, 50-75, or 75-100 mg), e.g., twice a day. In embodiments, rituximab is administered at a dosage of about 350-550 mg/m² (e.g., 350-375, 375-400, 400-425, 425-450, 450-475, or 475-500 mg/m²), e.g., intravenously.

[0787] In embodiments, a CAR-expressing cell described herein is administered to a subject in combination with an anaplastic lymphoma kinase (ALK) inhibitor. Exemplary ALK kinases include but are not limited to crizotinib (Pfizer), ceritinib (Novartis), alectinib (Chugai), brigatinib (also called AP26113; Ariad), entrectinib (Ignyta), PF-06463922 (Pfizer), TSR-011 (Tesaro) (see, e.g., Clinical Trial Identifier No. NCT02048488), CEP-37440 (Teva), and X-396 (Xcovery). In some embodiments, the subject has a solid cancer, e.g., a solid cancer described herein, e.g., lung cancer.

[0788] The chemical name of crizotinib is 3-[(1R)-1-(2,6-dichloro-3-fluorophenyl)ethoxy]-5-(1-piperidin-4-ylpyrazol-4-yl)pyridin-2-amine. The chemical name of ceritinib is 5-Chloro-N²-[2-isopropoxy-5-methyl-4-(4-piperidinyl)phenyl]-N⁴-[2-(isopropylsulfonyl)phenyl]-2,4-pyrimidinediamine. The chemical name of alectinib is 9-ethyl-6,6-dimethyl-8-(4-morpholinopiperidin-1-yl)-11-oxo-6,11-dihydro-5H-benzo[b]carbazole-3-carbonitrile. The chemical name of brigatinib is 5-Chloro-N²-{4-[4-(dimethylamino)-1-piperidinyl]-2-methoxyphenyl}-N⁴-[2-(dimethylphosphoryl)phenyl]-2,4-pyrimidinediamine. The chemical name of entrectinib is N-(5-(3,5-difluorobenzyl)-1H-indazol-3-yl)-4-(4-methylpiperazin-1-yl)-2-((tetrahydro-2H-pyran-4-yl)amino)benzamide. The chemical name of PF-06463922 is (10R)-7-Amino-12-fluoro-2,10,16-trimethyl-15-oxo-10,15,16,17-tetrahydro-2H-8,4-(metheno)pyrazolo[4,3-h][2,5,11]-benzoxadiazacyclotetradecine-3-carbonitrile. The chemical structure of CEP-37440 is (S)-2-((5-chloro-2-((6-(4-(2-hydroxyethyl)piperazin-1-yl)-1-methoxy-6,7,8,9-tetrahydro-5H-benzo[7]annulen-2-yl)amino)pyrimidin-4-yl)amino)-N-methylbenzamide. The chemical name of X-396 is (R)-6-amino-5-(1-(2,6-dichloro-3-fluorophenyl)ethoxy)-N-(4-(4-methylpiperazine-1-carbonyl)phenyl)pyridazine-3-carboxamide.

[0789] In one embodiment, the kinase inhibitor is a dual phosphatidylinositol 3-kinase (PI3K) and mTOR inhibitor selected from 2-Amino-8-[trans-4-(2-hydroxyethoxy)cyclohexyl]-6-(6-methoxy-3-pyridinyl)-4-methyl-pyrido[2,3-d]pyrimidin-7(8H)-one (PF-04691502); N-[4-[[4-(Dimethylamino)-1-piperidinyl]carbonyl]phenyl]-N-[4-(4,6-di-4-morpholinyl-1,3,5-triazin-2-yl)phenyl]urea (PF-05212384, PKI-587); 2-Methyl-2-{4-[3-methyl-2-oxo-8-(quinolin-3-yl)-2,3-dihydro-1H-imidazo[4,5-c]quinolin-1-yl]phenyl}propanenitrile (BEZ-235); apitolisib (GDC-0980, RG7422); 2,4-Difluoro-N-{2-(methyloxy)-5-[4-(4-pyridazinyl)-6-quinolinyl]-3-pyridinyl}benzenesulfonamide (GSK2126458); 8-(6-methoxypyridin-3-yl)-3-methyl-1-(4-(piperazin-1-yl)-3-(trifluoromethyl)phenyl)-1H-imidazo[4,5-c]quinolin-2(3H)-one Maleic acid (NVP-BGT226); 3-[4-(4-Morpholinylpyrido[3′,2′:4,5]furo[3,2-d]pyrimidin-2-yl]phenol (PI-103); 5-(9-isopropyl-8-methyl-2-morpholino-9H-purin-6-yl)pyrimidin-2-amine (VS-5584, SB2343); and N-[2-[(3,5-Dimethoxyphenyl)amino]quinoxalin-3-yl]-4-[(4-methyl-3-methoxyphenyl)carbonyl]aminophenylsulfonamide (XL765).

[0790] Drugs that inhibit either the calcium dependent phosphatase calcineurin (cyclosporine and FK506) or inhibit the p70S6 kinase that is important for growth factor induced signaling (rapamycin). (Liu et al., Cell 66:807-815, 1991; Henderson et al., Immun. 73:316-321, 1991; Bierer et al., Curr. Opin. Immun. 5:763-773, 1993) can also be used. In a further aspect, the cell compositions of the present invention may be administered to a patient in conjunction with (e.g., before, simultaneously or following) bone marrow transplantation, T cell ablative therapy using chemotherapy agents such as, fludarabine, external-beam radiation therapy (XRT), cyclophosphamide, and/or antibodies such as OKT3 or CAMPATH. In one aspect, the cell compositions of the present invention are administered following B-cell ablative therapy such as agents that react with CD20, e.g., Rituxan. For example, in one embodiment, subjects may undergo standard treatment with high dose chemotherapy followed by peripheral blood stem cell transplantation. In certain embodiments, following the transplant, subjects receive an infusion of the expanded immune cells of the present invention. In an additional embodiment, expanded cells are administered before or following surgery.

[0791] In one embodiment, a CAR expressing cell described herein is administered to a subject in combination with a biphosphonate, e.g., Pamidronate (Aredia®); Zoledronic acid or Zoledronate (Zometa®, Zomera®, Aclasta®, or Reclast®); Alendronate (Fosamax®); Risedronate (Actonel®); Ibandronate (Boniva®); Clondronate (Bonefos®); Etidronate (Didronel®); Tiludronate (Skelid®); Pamidronate (Aredia®); Neridronate (Nerixia®); Strontiun ranelate (Protelos®, or Protos®); and Teriparatide (Forteo®).

[0792] In one embodiment, a CAR expressing cell described herein is administered to a subject in combination with a corticosteroid, e.g., dexamethasone (e.g., Decadron®), beclomethasone (e.g., Beclovent®), hydrocortisone (also known as cortisone, hydrocortisone sodium succinate, hydrocortisone sodium phosphate, and sold under the tradenames Ala-Cort®, hydrocortisone phosphate, Solu-Cortef®, Hydrocort Acetate® and Lanacort®), prednisolone (sold under the tradenames Delta-Cortel®, Orapred®, Pediapred® and Prelone®), prednisone (sold under the tradenames Deltasone®, Liquid Red®, Meticorten® and Orasone®), methylprednisolone (also known as 6-methylprednisolone, methylprednisolone acetate, methylprednisolone sodium succinate, sold under the tradenames Duralone®, Medralone®, Medrol®, M-Prednisol® and Solu-Medrol®); antihistamines, such as diphenhydramine (e.g., Benadryl®), hydroxyzine, and cyproheptadine; and bronchodilators, such as the beta-adrenergic receptor agonists, albuterol (e.g., Proventil®), and terbutaline (Brethine®).

[0793] In one embodiment, a CAR expressing cell described herein is administered to a subject in combination with an immunomodulator, e.g., Afutuzumab (available from Roche®); Pegfilgrastim (Neulasta®); Lenalidomide (CC-5013, Revlimid®); Thalidomide (Thalomid®), Actimid (CC4047); and IRX-2 (mixture of human cytokines including interleukin 1, interleukin 2, and interferon γ, CAS 951209-71-5, available from IRX Therapeutics.

[0794] In one embodiment, a CAR expressing cell described herein is administered to a subject in combination with a proteasome inhibitor, e.g., Bortezomib (Velcade®); Ixazomib citrate (MLN9708, CAS 1201902-80-8); Danoprevir (RG7227, CAS 850876-88-9); Ixazomib (MLN2238, CAS 1072833-77-2); and (S)—N-[(phenylmethoxy)carbonyl]-L-leucyl-N-(1-formyl-3-methylbutyl)-L-Leucinamide (MG-132, CAS 133407-82-6).

[0795] In one embodiment, a CAR expressing cell described herein is administered to a subject in combination with a vascular endothelial growth factor (VEGF) receptor, e.g., Bevacizumab (Avastin®), axitinib (Inlyta®); Brivanib alaninate (BMS-582664, (S)—((R)-1-(4-(4-Fluoro-2-methyl-1H-indol-5-yloxy)-5-methylpyrrolo[2,1-f][1,2,4]triazin-6-yloxy)propan-2-yl)2-aminopropanoate); Sorafenib (Nexavar®); Pazopanib (Votrient®); Sunitinib malate (Sutent®); Cediranib (AZD2171, CAS 288383-20-1); Vargatef (BIBF1120, CAS 928326-83-4); Foretinib (GSK1363089); Telatinib (BAY57-9352, CAS 332012-40-5); Apatinib (YN968D1, CAS 811803-05-1); Imatinib (Gleevec®); Ponatinib (AP24534, CAS 943319-70-8); Tivozanib (AV951, CAS 475108-18-0); Regorafenib (BAY73-4506, CAS 755037-03-7); Vatalanib dihydrochloride (PTK787, CAS 212141-51-0); Brivanib (BMS-540215, CAS 649735-46-6); Vandetanib (Caprelsa® or AZD6474); Motesanib diphosphate (AMG706, CAS 857876-30-3, N-(2,3-dihydro-3,3-dimethyl-1H-indol-6-yl)-2-[(4-pyridinylmethyl)amino]-3-pyridinecarboxamide, described in PCT Publication No. WO 02/066470); Dovitinib dilactic acid (TKI258, CAS 852433-84-2); Linfanib (ABT869, CAS 796967-16-3); Cabozantinib (XL184, CAS 849217-68-1); Lestaurtinib (CAS 111358-88-4); N-[5-[[[5-(1,1-Dimethylethyl)-2-oxazolyl]methyl]thio]-2-thiazolyl]-4-piperidinecarboxamide (BMS38703, CAS 345627-80-7); (3R,4R)-4-Amino-1-((4-((3-methoxyphenyl)amino)pyrrolo[2,1-f][1,2,4]triazin-5-yl)methyl)piperidin-3-ol (BMS690514); N-(3,4-Dichloro-2-fluorophenyl)-6-methoxy-7-[[(3aα,5β,6aα)-octahydro-2-methylcyclopenta[c]pyrrol-5-yl]methoxy]-4-quinazolinamine (XL647, CAS 781613-23-8); 4-Methyl-3-[[1-methyl-6-(3-pyridinyl)-1H-pyrazolo[3,4-d]pyrimidin-4-yl]amino]-N-[3-(trifluoromethyl)phenyl]-benzamide (BHG712, CAS 940310-85-0); and Aflibercept (Eylea®).

[0796] In one embodiment, a CAR expressing cell described herein is administered to a subject in combination with a CD20 antibody or a conjugate thereof, e.g., Rituximab (Riuxan® and MabThera®); and Tositumomab (Bexxar®); and Ofatumumab (Arzerra®), Ibritumomab tiuxetan (Zevalin®); and Tositumomab,

[0797] In one embodiment, a CAR expressing cell described herein is administered to a subject in combination with an anticonvulsant, e.g., Anticonvulsants (antiepileptic or antiseizure drugs): aldehydes, e.g., paraldehyde; aromatic allylic alcohols, e.g., stiripentol (Diacomit®); barbiturates, e.g., phenobarbital (Luminal®), methylphenobarbital (Mebaral®), barbexaclone (Maliasin®), benzodiazepines, e.g., clobazam (Onfi®), clonazepam (Klonopin®), clorazepate (Tranxene® and Novo-Clopate®), diazepam (Valium®, Lembrol®, Diastat®), midazolam (Versed®), lorazepam (Ativan® and Orfidal®), nitrazepam (Alodorm®, Arem®, Insoma®), temazepam (Restoril®, Normison®), nimetzepam (Erimin®), bromides, e.g., potassium bromide; carbamates, e.g., felbamate (Felbatol®); carboxamides, e.g., carbamazepine (Tegretol®, Equetro®), oxcarbazepine (Trileptal®, Oxcarb®), eslicarbazepine acetate (Aptiom®); fatty acids, e.g., valproates (valproic acid, sodium valproate, divalproex sodium), vigabatrin (Sabril®), progabide (Gabren®), tiagabine (Gabitril®); fructose derivatives, e.g., topiramate (Topamax®); GABA analogs, e.g., gabapentin (Neurontin®), pregabalin (Lyrica®); hydantoins, e.g., ethotoin (Peganone®), phenytoin (Dilantin®), mephenytoin (Mesantoin®), fosphenytoin (Cerebyx®, Prodilantin®); oxazolidinediones, e.g., paramethadione (Paradione®), trimethadione (Tridione®); propionates, e.g., beclamide (Choracon®, Hibicon®, Posedrine®); pyrimidinediones, e.g., primidone (Mysoline®); pyrrolidines, e.g., brivaracetam, levetiracetam, seletracetam (Keppra®); succinimides, e.g., ethosuximide (Zarontin®), phensuximide (Milontin®), mesuximide (Celontin®, Petinutin®); sulfonamides, e.g., acetazolamide (Diamox®), sultiame (Ospolot®), methazolamide (Neptazane®), zonisamide (Zonegran®); triazines, e.g., lamotrigine (Lamictal®); ureas, e.g., pheneturide, phenacemide (Phenurone®); valproylamides (amide derivaties of valproate), e.g., valpromide (Depamide®), valnoctamide; AMPA receptor antagonist, e.g., perampanel (Fycompa®).

[0798] In embodiments, a CAR-expressing cell described herein is administered to a subject in combination with an indoleamine 2,3-dioxygenase (IDO) inhibitor. IDO is an enzyme that catalyzes the degradation of the amino acid, L-tryptophan, to kynurenine. Many cancers overexpress IDO, e.g., prostatic, colorectal, pancreatic, cervical, gastric, ovarian, head, and lung cancer. pDCs, macrophages, and dendritic cells (DCs) can express IDO. Without being bound by theory, it is thought that a decrease in L-tryptophan (e.g., catalyzed by IDO) results in an immunosuppressive milieu by inducing T-cell anergy and apoptosis. Thus, without being bound by theory, it is thought that an IDO inhibitor can enhance the efficacy of a CAR-expressing cell described herein, e.g., by decreasing the suppression or death of a CAR-expressing immune cell. In embodiments, the subject has a solid tumor, e.g., a solid tumor described herein, e.g., prostatic, colorectal, pancreatic, cervical, gastric, ovarian, head, or lung cancer. Exemplary inhibitors of IDO include but are not limited to 1-methyl-tryptophan, indoximod (NewLink Genetics) (see, e.g., Clinical Trial Identifier Nos. NCT01191216; NCT01792050), and INCB024360 (Incyte Corp.) (see, e.g., Clinical Trial Identifier Nos. NCT01604889; NCT01685255)

[0799] In embodiments, a CAR-expressing cell described herein is administered to a subject in combination with a modulator of myeloid-derived suppressor cells (MDSCs). MDSCs accumulate in the periphery and at the tumor site of many solid tumors. These cells suppress T cell responses, thereby hindering the efficacy of CAR-expressing cell therapy. Without being bound by theory, it is thought that administration of a MDSC modulator enhances the efficacy of a CAR-expressing cell described herein. In an embodiment, the subject has a solid tumor, e.g., a solid tumor described herein, e.g., glioblastoma. Exemplary modulators of MDSCs include but are not limited to MCS110 and BLZ945. MCS110 is a monoclonal antibody (mAb) against macrophage colony-stimulating factor (M-CSF). See, e.g., Clinical Trial Identifier No. NCT00757757. BLZ945 is a small molecule inhibitor of colony stimulating factor 1 receptor (CSF1R). See, e.g., Pyonteck et al. Nat. Med. 19(2013):1264-72. The structure of BLZ945 is shown below.

[chemical structure]

[0800] In embodiments, a CAR-expressing cell described herein is administered to a subject in combination with a CD19 CART cell (e.g., CTL019, e.g., as described in WO2012/079000, incorporated herein by reference). In embodiments, the subject has acute myeloid leukemia (AML), e.g., a CD19 positive AML or a CD19 negative AML. In embodiments, the subject has a CD19+ lymphoma, e.g., a CD19+Non-Hodgkin's Lymphoma (NHL), a CD19+FL, or a CD19+DLBCL. In embodiments, the subject has a relapsed or refractory CD19+ lymphoma. In embodiments, a lymphodepleting chemotherapy is administered to the subject prior to, concurrently with, or after administration (e.g., infusion) of CD19 CART cells. In an example, the lymphodepleting chemotherapy is administered to the subject prior to administration of CD19 CART cells. For example, the lymphodepleting chemotherapy ends 1-4 days (e.g., 1, 2, 3, or 4 days) prior to CD19 CART cell infusion. In embodiments, multiple doses of CD19 CART cells are administered, e.g., as described herein. For example, a single dose comprises about 5×10⁸ CD19 CART cells. In embodiments, a lymphodepleting chemotherapy is administered to the subject prior to, concurrently with, or after administration (e.g., infusion) of a CAR-expressing cell described herein, e.g., a non-CD19 CAR-expressing cell. In embodiments, a CD19 CART is administered to the subject prior to, concurrently with, or after administration (e.g., infusion) of a non-CD19 CAR-expressing cell, e.g., a non-CD19 CAR-expressing cell described herein.

[0801] In some embodiments, a CAR-expressing cell described herein is administered to a subject in combination with a CD19 CAR-expressing cell, e.g., CTL019, e.g., as described in WO2012/079000, incorporated herein by reference, for treatment of a disease associated with the expression of BCMA, e.g., a cancer described herein. Without being bound by theory, it is believed that administering a CD19 CAR-expressing cell in combination with a CAR-expressing cell improves the efficacy of a CAR-expressing cell described herein by targeting early lineage cancer cells, e.g., cancer stem cells, modulating the immune response, depleting regulatory B cells, and/or improving the tumor microenvironment. For example, a CD19 CAR-expressing cell targets cancer cells that express early lineage markers, e.g., cancer stem cells and CD19-expressing cells, while the CAR-expressing cell described herein targets cancer cells that express later lineage markers, e.g., BCMA. This preconditioning approach can improve the efficacy of the CAR-expressing cell described herein. In such embodiments, the CD19 CAR-expressing cell is administered prior to, concurrently with, or after administration (e.g., infusion) of a CAR-expressing cell described herein.

[0802] In embodiments, a CAR-expressing cell described herein also expresses a CAR targeting CD19, e.g., a CD19 CAR. In an embodiment, the cell expressing a CAR described herein and a CD19 CAR is administered to a subject for treatment of a cancer described herein, e.g., AML. In an embodiment, the configurations of one or both of the CAR molecules comprise a primary intracellular signaling domain and a costimulatory signaling domain. In another embodiment, the configurations of one or both of the CAR molecules comprise a primary intracellular signaling domain and two or more, e.g., 2, 3, 4, or 5 or more, costimulatory signaling domains. In such embodiments, the CAR molecule described herein and the CD19 CAR may have the same or a different primary intracellular signaling domain, the same or different costimulatory signaling domains, or the same number or a different number of costimulatory signaling domains. Alternatively, the CAR described herein and the CD19 CAR are configured as a split CAR, in which one of the CAR molecules comprises an antigen binding domain and a costimulatory domain (e.g., 4-1BB), while the other CAR molecule comprises an antigen binding domain and a primary intracellular signaling domain (e.g., CD3 zeta).

[0803] In some embodiments, a CAR-expressing cell described herein is administered to a subject in combination with a interleukin-15 (IL-15) polypeptide, a interleukin-15 receptor alpha (IL-15Ra) polypeptide, or a combination of both a IL-15 polypeptide and a IL-15Ra polypeptide e.g., hetIL-15 (Admune Therapeutics, LLC). hetIL-15 is a heterodimeric non-covalent complex of IL-15 and IL-15Ra. hetIL-15 is described in, e.g., U.S. Pat. No. 8,124,084, U.S. 2012/0177598, U.S. 2009/0082299, U.S. 2012/0141413, and U.S. 2011/0081311, incorporated herein by reference. In embodiments, het-IL-15 is administered subcutaneously. In embodiments, the subject has a cancer, e.g., solid cancer, e.g., melanoma or colon cancer. In embodiments, the subject has a metastatic cancer.

[0804] In one embodiment, the subject can be administered an agent which reduces or ameliorates a side effect associated with the administration of a CAR-expressing cell. Side effects associated with the administration of a CAR-expressing cell include, but are not limited to CRS, and hemophagocytic lymphohistiocytosis (HLH), also termed Macrophage Activation Syndrome (MAS). Symptoms of CRS include high fevers, nausea, transient hypotension, hypoxia, and the like. CRS may include clinical constitutional signs and symptoms such as fever, fatigue, anorexia, myalgias, arthalgias, nausea, vomiting, and headache. CRS may include clinical skin signs and symptoms such as rash. CRS may include clinical gastrointestinal signs and symsptoms such as nausea, vomiting and diarrhea. CRS may include clinical respiratory signs and symptoms such as tachypnea and hypoxemia. CRS may include clinical cardiovascular signs and symptoms such as tachycardia, widened pulse pressure, hypotension, increased cardiac output (early) and potentially diminished cardiac output (late). CRS may include clinical coagulation signs and symptoms such as elevated d-dimer, hypofibrinogenemia with or without bleeding. CRS may include clinical renal signs and symptoms such as azotemia. CRS may include clinical hepatic signs and symptoms such as transaminitis and hyperbilirubinemia. CRS may include clinical neurologic signs and symptoms such as headache, mental status changes, confusion, delirium, word finding difficulty or frank aphasia, hallucinations, tremor, dymetria, altered gait, and seizures.

[0805] Accordingly, the methods described herein can comprise administering a CAR-expressing cell described herein to a subject and further administering one or more agents to manage elevated levels of a soluble factor resulting from treatment with a CAR-expressing cell. In one embodiment, the soluble factor elevated in the subject is one or more of IFN-γ, TNFα, IL-2 and IL-6. In an embodiment, the factor elevated in the subject is one or more of IL-1, GM-CSF, IL-10, IL-8, IL-5 and fraktalkine. Therefore, an agent administered to treat this side effect can be an agent that neutralizes one or more of these soluble factors. In one embodiment, the agent that neutralizes one or more of these soluble forms is an antibody or antibody fragment. Examples of such agents include, but are not limited to a steroid (e.g., corticosteroid), an inhibitor of TNFα, and an inhibitor of IL-6. An example of a TNFα inhibitor is an anti-TNFα antibody molecule such as, infliximab, adalimumab, certolizumab pegol, and golimumab. Another example of a TNFα inhibitor is a fusion protein such as entanercept. Small molecule inhibitors of TNFα include, but are not limited to, xanthine derivatives (e.g. pentoxifylline) and bupropion. An example of an IL-6 inhibitor is an anti-IL-6 antibody molecule such as tocilizumab (toc), sarilumab, elsilimomab, CNTO 328, ALD518/BMS-945429, CNTO 136, CPSI-2364, CDP6038, VX30, ARGX-109, FE301, and FM101. In one embodiment, the anti-IL-6 antibody molecule is tocilizumab. An example of an IL-1R based inhibitor is anakinra.

[0806] In some embodiment, the subject is administered a corticosteroid, such as, e.g., methylprednisolone, hydrocortisone, among others.

[0807] In some embodiments, the subject is administered a vasopressor, such as, e.g., norepinephrine, dopamine, phenylephrine, epinephrine, vasopressin, or a combination thereof.

[0808] In an embodiment, the subject can be administered an antipyretic agent. In an embodiment, the subject can be administered an analgesic agent.

[0809] In one embodiment, the subject can be administered an agent that prevents trafficking of the BCMA CAR-expressing cell to the brain, e.g., natalizumab (TYSABRI®). BCMA expression, e.g., a splice variant thereof, has been detected in some parts of the brain, e.g., the cerebellum or medulla oblongata. Without being bound by any particular theory, prevention of trafficking of the BCMA CAR-expressing cells to the brain is preferred to prevent any BCMA CAR-expressing cells from interacting with or acting on BCMA-expressing brain tissue.

[0810] In one embodiment, the subject can be administered an agent which enhances the activity of a CAR-expressing cell. For example, in one embodiment, the agent can be an agent which inhibits an inhibitory molecule, e.g., the agent is a checkpoint inhibitor. Inhibitory molecules, e.g., Programmed Death 1 (PD1), can, in some embodiments, decrease the ability of a CAR-expressing cell to mount an immune effector response. Examples of inhibitory molecules include PD1, PD-L1, PD-L2, CTLA4, TIM3, CEACAM (e.g., CEACAM-1, CEACAM-3 and/or CEACAM-5), LAG3, VISTA, BTLA, TIGIT, LAIR1, CD160, 2B4, CD80, CD86, B7-H3 (CD276), B7-H4 (VTCN1), HVEM (TNFRSF14 or CD270), KIR, A2aR, MHC class I, MHC class II, GAL9, adenosine, and TGFR beta. Inhibition of an inhibitory molecule, e.g., by inhibition at the DNA, RNA or protein level, can optimize a CAR-expressing cell performance. In embodiments, an inhibitory nucleic acid, e.g., an inhibitory nucleic acid, e.g., a dsRNA, e.g., an siRNA or shRNA, a clustered regularly interspaced short palindromic repeats (CRISPR), a transcription-activator like effector nuclease (TALEN), or a zinc finger endonuclease (ZFN), e.g., as described herein, can be used to inhibit expression of an inhibitory molecule in the CAR-expressing cell. In an embodiment the inhibitor is an shRNA. In an embodiment, the inhibitory molecule is inhibited within a CAR-expressing cell. In these embodiments, a dsRNA molecule that inhibits expression of the inhibitory molecule is linked to the nucleic acid that encodes a component, e.g., all of the components, of the CAR. In embodiments, a CAR-expressing cell described herein is administered in combination with an inhibitor of an inhibitory molecule, e.g., in combination with a checkpoint inhibitor, e.g., in combination with an inhibitor of PD1 and/or PD-L1. In embodiments, a CAR-expressing cell described herein is administered in combination with an inhibitor of PD1. In embodiments, a CAR-expressing cell described herein is administered in combination with an inhibitor of PD-L1.

[0811] In an embodiment, a nucleic acid molecule that encodes a dsRNA molecule that inhibits expression of the molecule that modulates or regulates, e.g., inhibits, T-cell function is operably linked to a promoter, e.g., a H1- or a U6-derived promoter such that the dsRNA molecule that inhibits expression of the molecule that modulates or regulates, e.g., inhibits, T-cell function is expressed, e.g., is expressed within a CAR-expressing cell. See e.g., Tiscornia G., “Development of Lentiviral Vectors Expressing siRNA,” Chapter 3, in Gene Transfer: Delivery and Expression of DNA and RNA (eds. Friedmann and Rossi). Cold Spring Harbor Laboratory Press, Cold Spring Harbor, N.Y., USA, 2007; Brummelkamp T R, et al. (2002) Science 296: 550-553; Miyagishi M, et al. (2002) Nat. Biotechnol. 19: 497-500. In an embodiment the nucleic acid molecule that encodes a dsRNA molecule that inhibits expression of the molecule that modulates or regulates, e.g., inhibits, T-cell function is present on the same vector, e.g., a lentiviral vector, that comprises a nucleic acid molecule that encodes a component, e.g., all of the components, of the CAR. In such an embodiment, the nucleic acid molecule that encodes a dsRNA molecule that inhibits expression of the molecule that modulates or regulates, e.g., inhibits, T-cell function is located on the vector, e.g., the lentiviral vector, 5′- or 3′- to the nucleic acid that encodes a component, e.g., all of the components, of the CAR. The nucleic acid molecule that encodes a dsRNA molecule that inhibits expression of the molecule that modulates or regulates, e.g., inhibits, T-cell function can be transcribed in the same or different direction as the nucleic acid that encodes a component, e.g., all of the components, of the CAR. In an embodiment the nucleic acid molecule that encodes a dsRNA molecule that inhibits expression of the molecule that modulates or regulates, e.g., inhibits, T-cell function is present on a vector other than the vector that comprises a nucleic acid molecule that encodes a component, e.g., all of the components, of the CAR. In an embodiment, the nucleic acid molecule that encodes a dsRNA molecule that inhibits expression of the molecule that modulates or regulates, e.g., inhibits, T-cell function it transiently expressed within a CAR-expressing cell. In an embodiment, the nucleic acid molecule that encodes a dsRNA molecule that inhibits expression of the molecule that modulates or regulates, e.g., inhibits, T-cell function is stably integrated into the genome of a CAR-expressing cell. FIGS. 41A-41E depicts examples of vectors for expressing a component, e.g., all of the components, of the CAR with a dsRNA molecule that inhibits expression of the molecule that modulates or regulates, e.g., inhibits, T-cell function.

[0812] Examples of dsRNA molecules useful for inhibiting expression of a molecule that modulates or regulates, e.g., inhibits, T-cell function, wherein the molecule that modulates or regulates, e.g., inhibits, T-cell function is PD-1 are provided below.

[0813] Provided in Table 18 below are the names of PDCD1 (PD1) RNAi agents (derived from their position in the mouse PDCD1 gene sequence NM_{—}008798.2), along with the SEQ ID NOs: 286-333 representing the DNA sequence. Both sense (S) and antisense (AS) sequences are presented as 19mer and 21mer sequences are in this table. Also note that the position (PoS, e.g., 176) is derived from the position number in the mouse PDCD1 gene sequence NM_{—}008798.2. SEQ ID NOs are indicated in groups of 12 that correspond with “sense 19” SEQ ID NOs: 286-297; “sense 21” SEQ ID NOs: 298-309; “asense 21” SEQ ID NOs: 310-321; “asense 19” SEQ ID NOs: 322-333.

TABLE 18
Mouse PDCD1 (PD1) shRNA sequences

| Position | | | | | |
|---|---|---|---|---|---|
| on | Target | | | | |
| NM_008798.2 | region | Sense19 | Sense21 | Asense21 | Asense19 |
| 176 | CDS | GGAGGTCCCT | CTGGAGGTCC | TAGAAGGTGA | TAGAAGGTGA |
| | | CACCTTCTA | CTCACCTTCT | GGGACCTCCA | GGGACCTCC |
| | | (SEQ ID NO: | A | G | (SEQ ID NO: |
| | | 286) | (SEQ ID NO: | (SEQ ID NO: | 322) |
| | | | 298) | 310) | |
| 260 | CDS | CGGAGGATCT | GTCGGAGGAT | TTCAGCATAA | TTCAGCATAA |
| | | TATGCTGAA | CTTATGCTGA | GATCCTCCGA | GATCCTCCG |
| | | (SEQ ID NO: | A | C | (SEQ ID NO: |
| | | 287) | (SEQ ID NO: | (SEQ ID NO: | 323) |
| | | | 299) | 311) | |
| 359 | CDS | CCCGCTTCCA | TGCCCGCTTC | TGTATGATCT | TGTATGATCT |
| | | GATCATACA | CAGATCATAC | GGAAGCGGGC | GGAAGCGGG |
| | | (SEQ ID NO: | A | A | (SEQ ID NO: |
| | | 288) | (SEQ ID NO: | (SEQ ID NO: | 324) |
| | | | 300) | 312) | |
| 528 | CDS | GGAGACCTCA | CTGGAGACCT | ATATCTTGTT | ATATCTTGTT |
| | | ACAAGATAT | CAACAAGATA | GAGGTCTCCA | GAGGTCTCC |
| | | (SEQ ID NO: | T | G | (SEQ ID NO: |
| | | 289) | (SEQ ID NO: | (SEQ ID NO: | 325) |
| | | | 301) | 313) | |
| 581 | CDS | AAGGCATGGT | TCAAGGCATG | ATACCAATGA | ATACCAATGA |
| | | CATTGGTAT | GTCATTGGTA | CCATGCCTTG | CCATGCCTT |
| | | (SEQ ID NO: | T | A | (SEQ ID NO: |
| | | 290) | (SEQ ID NO: | (SEQ ID NO: | 326) |
| | | | 302) | 314) | |
| 584 | CDS | GCATGGTCAT | AGGCATGGTC | ATGATACCAA | ATGATACCAA |
| | | TGGTATCAT | ATTGGTATCA | TGACCATGCC | TGACCATGC |
| | | (SEQ ID NO: | T | T | (SEQ ID NO: |
| | | 291) | (SEQ ID NO: | (SEQ ID NO: | 327) |
| | | | 303) | 315) | |
| 588 | CDS | GGTCATTGGT | ATGGTCATTG | ATGGTCATTG | ATGGTCATTG |
| | | ATCATGAGT | GTATCATGAG | GTATCATGAG | GTATCATGA |
| | | (SEQ ID NO: | T | T | (SEQ ID NO: |
| | | 292) | (SEQ ID NO: | (SEQ ID NO: | 328) |
| | | | 304) | 316) | |
| 609 | CDS | CCTAGTGGGT | GCCCTAGTGG | GCCCTAGTGG | GCCCTAGTGG |
| | | ATCCCTGTA | GTATCCCTGT | GTATCCCTGT | GTATCCCTG |
| | | (SEQ ID NO: | A | A | (SEQ ID NO: |
| | | 293) | (SEQ ID NO: | (SEQ ID NO: | 329) |
| | | | 305) | 317) | |
| 919 | CDS | GAGGATGGAC | ATGAGGATGG | ATGAGGATGG | ATGAGGATGG |
| | | ATTGTTCTT | ACATTGTTCTT | ACATTGTTCTT | ACATTGTTC |
| | | (SEQ ID NO: | (SEQ ID NO: | (SEQ ID NO: | (SEQ ID NO: |
| | | 294) | 306) | 318) | 330) |
| 1021 | 3′UTR | GCATGCAGGC | GAGCATGCAG | GAGCATGCAG | GAGCATGCAG |
| | | TACAGTTCA | GCTACAGTTC | GCTACAGTTC | GCTACAGTT |
| | | (SEQ ID NO: | A | A | (SEQ ID NO: |
| | | 295) | (SEQ ID NO: | (SEQ ID NO: | 331) |
| | | | 307) | 319) | |
| 1097 | 3′UTR | CCAGCACATG | TTCCAGCACA | TTCCAGCACA | TTCCAGCACA |
| | | CACTGTTGA | TGCACTGTTG | TGCACTGTTG | TGCACTGTT |
| | | (SEQ ID NO: | A | A | (SEQ ID NO: |
| | | 296) | (SEQ ID NO: | (SEQ ID NO: | 332) |
| | | | 308) | 320) | |
| 1101 | 3′UTR | CACATGCACT | AGCACATGCA | AGCACATGCA | AGCACATGCA |
| | | GTTGAGTGA | CTGTTGAGTG | CTGTTGAGTG | CTGTTGAGT |
| | | (SEQ ID NO: | A | A | (SEQ ID NO: |
| | | 297) | (SEQ ID NO: | (SEQ ID NO: | 333) |
| | | | 309) | 321) | |

[0814] Provided in Table 19 below are the names of PDCD1 (PD1) RNAi agents (derived from their position in the human PDCD1 gene sequence, along with the SEQ ID NOs. 334-381 representing the DNA sequence. Both sense (S) and antisense (AS) sequences are presented as 19mer and 21mer sequences. SEQ ID NOs are indicated in groups of 12 that correspond with “sense 19” SEQ ID NOs: 334-345; “sense 21” SEQ ID NOs: 346-357; “asense 21” SEQ ID NOs: 358-369; “asense 19” SEQ ID NOs: 370-381.

TABLE 19
Human PDCD1 (PD1) shRNA sequences

| Position | | | | | |
|---|---|---|---|---|---|
| on | Target | | | | |
| NM_005018.2 | region | Sense19 | Asense19 | Sense21 | Asense21 |
| 145 | CDS | GGCCAGGATG | TCTAAGAACC | GCGGCCAGGA | TCTAAGAACC |
| | | GTTCTTAGA | ATCCTGGCC | TGGTTCTTAG | ATCCTGGCCG |
| | | (SEQ ID NO: | (SEQ ID NO: | A | C |
| | | 334) | 346) | (SEQ ID NO: | (SEQ ID NO: |
| | | | | 358) | 370) |
| 271 | CDS | GCTTCGTGCT | TACCAGTTTA | GAGCTTCGTG | TACCAGTTTA |
| | | AAACTGGTA | GCACGAAGC | CTAAACTGGT | GCACGAAGCT |
| | | (SEQ ID NO: | (SEQ ID NO: | A | C |
| | | 335) | 347) | (SEQ ID NO: | (SEQ ID NO: |
| | | | | 359) | 371) |
| 393 | CDS | GGGCGTGACT | TCATGTGGAA | ACGGGCGTGA | TCATGTGGAA |
| | | TCCACATGA | GTCACGCCC | CTTCCACATG | GTCACGCCCG |
| | | (SEQ ID NO: | (SEQ ID NO: | A | T |
| | | 336) | 348) | (SEQ ID NO: | (SEQ ID NO: |
| | | | | 360) | 372) |
| 1497 | 3′UTR | CAGGCCTAGA | TGAAACTTCT | TGCAGGCCTA | TGAAACTTCT |
| | | GAAGTTTCA | CTAGGCCTG | GAGAAGTTTC | CTAGGCCTGC |
| | | (SEQ ID NO: | (SEQ ID NO: | A | A |
| | | 337) | 349) | (SEQ ID NO: | (SEQ ID NO: |
| | | | | 361) | 373) |
| 1863 | 3′UTR | CTTGGAACCC | TTCAGGAATG | TCCTTGGAAC | TTCAGGAATG |
| | | ATTCCTGAA | GGTTCCAAG | CCATTCCTGA | GGTTCCAAGG |
| | | (SEQ ID NO: | (SEQ ID NO: | A | A |
| | | 338) | 350) | (SEQ ID NO: | (SEQ ID NO: |
| | | | | 362) | 374) |
| 1866 | 3′UTR | GGAACCCATT | AATTTCAGGA | TTGGAACCCA | AATTTCAGGA |
| | | CCTGAAATT | ATGGGTTCC | TTCCTGAAAT | ATGGGTTCCA |
| | | (SEQ ID NO: | (SEQ ID NO: | T | A |
| | | 339) | 351) | (SEQ ID NO: | (SEQ ID NO: |
| | | | | 363) | 375) |
| 1867 | 3′UTR | GAACCCATTC | TAATTTCAGG | TGGAACCCAT | TAATTTCAGG |
| | | CTGAAATTA | AATGGGTTC | TCCTGAAATT | AATGGGTTCC |
| | | (SEQ ID NO: | (SEQ ID NO: | A | A |
| | | 340) | 352) | (SEQ ID NO: | (SEQ ID NO: |
| | | | | 364) | 376) |
| 1868 | 3′UTR | AACCCATTCC | ATAATTTCAG | GGAACCCATT | ATAATTTCAG |
| | | TGAAATTAT | GAATGGGTT | CCTGAAATTA | GAATGGGTTC |
| | | (SEQ ID NO: | (SEQ ID NO: | T | C |
| | | 341) | 353) | (SEQ ID NO: | (SEQ ID |
| | | | | 365) | NO: 377) |
| 1869 | 3′UTR | ACCCATTCCT | AATAATTTCA | GAACCCATTC | AATAATTTCA |
| | | GAAATTATT | GGAATGGGT | CTGAAATTAT | GGAATGGGTT |
| | | (SEQ ID NO: | (SEQ ID NO: | T | C |
| | | 342) | 354) | (SEQ ID NO: | (SEQ ID NO: |
| | | | | 366) | 378) |
| 1870 | 3′UTR | CCCATTCCTG | AAATAATTTC | AACCCATTCC | AAATAATTTC |
| | | AAATTATTT | AGGAATGGG | TGAAATTATT | AGGAATGGGT |
| | | (SEQ ID NO: | (SEQ ID NO: | T | T |
| | | 343) | 355) | (SEQ ID NO: | (SEQ ID NO: |
| | | | | 367) | 379) |
| 2079 | 3′UTR | CTGTGGTTCT | TAATATAATA | CCCTGTGGTT | TAATATAATA |
| | | ATTATATTA | GAACCACAG | CTATTATATT | GAACCACAGG |
| | | (SEQ ID NO: | (SEQ ID NO: | A | G |
| | | 344) | 356) | (SEQ ID NO: | (SEQ ID NO: |
| | | | | 368) | 380) |
| 2109 | 3′UTR | AAATATGAGA | TTAGCATGCT | TTAAATATGA | TTAGCATGCT |
| | | GCATGCTAA | CTCATATTT | GAGCATGCTA | CTCATATTTA |
| | | (SEQ ID NO: | (SEQ ID NO: | A | A |
| | | 345) | 357) | (SEQ ID NO: | (SEQ ID NO: |
| | | | | 369) | 381) |

[0815] In one embodiment, the inhibitor of an inhibitory signal can be, e.g., an antibody or antibody fragment that binds to an inhibitory molecule. For example, the agent can be an antibody or antibody fragment that binds to PD1, PD-L1, PD-L2 or CTLA4 (e.g., ipilimumab (also referred to as MDX-010 and MDX-101, and marketed as Yervoy®; Bristol-Myers Squibb; Tremelimumab (IgG2 monoclonal antibody available from Pfizer, formerly known as ticilimumab, CP-675,206).). In an embodiment, the agent is an antibody or antibody fragment that binds to TIM3. In an embodiment, the agent is an antibody or antibody fragment that binds to LAG3. In embodiments, the agent that enhances the activity of a CAR-expressing cell, e.g., inhibitor of an inhibitory molecule, is administered in combination with an allogeneic CAR, e.g., an allogeneic CAR described herein (e.g., described in the Allogeneic CAR section herein).

[0816] PD-1 is an inhibitory member of the CD28 family of receptors that also includes CD28, CTLA-4, ICOS, and BTLA. PD-1 is expressed on activated B cells, T cells and myeloid cells (Agata et al. 1996 Int. Immunol 8:765-75). Two ligands for PD-1, PD-L1 and PD-L2 have been shown to downregulate T cell activation upon binding to PD-1 (Freeman et a. 2000 J Exp Med 192:1027-34; Latchman et al. 2001 Nat Immunol 2:261-8; Carter et al. 2002 Eur J Immunol 32:634-43). PD-L1 is abundant in human cancers (Dong et al. 2003 J Mol Med 81:281-7; Blank et al. 2005 Cancer Immunol. Immunother 54:307-314; Konishi et al. 2004 Clin Cancer Res 10:5094). Immune suppression can be reversed by inhibiting the local interaction of PD-1 with PD-L1. Antibodies, antibody fragments, and other inhibitors of PD-1, PD-L1 and PD-L2 are available in the art and may be used combination with a cars of the present invention described herein. For example, nivolumab (also referred to as BMS-936558 or MDX1106; Bristol-Myers Squibb) is a fully human IgG4 monoclonal antibody which specifically blocks PD-1. Nivolumab (clone 5C4) and other human monoclonal antibodies that specifically bind to PD-1 are disclosed in U.S. Pat. No. 8,008,449 and WO2006/121168. Pidilizumab (CT-011; Cure Tech) is a humanized IgG1k monoclonal antibody that binds to PD-1. Pidilizumab and other humanized anti-PD-1 monoclonal antibodies are disclosed in WO2009/101611. Pembrolizumab (formerly known as lambrolizumab, and also referred to as MK03475; Merck) is a humanized IgG4 monoclonal antibody that binds to PD-1. Pembrolizumab and other humanized anti-PD-1 antibodies are disclosed in U.S. Pat. No. 8,354,509 and WO2009/114335. MEDI4736 (Medimmune) is a human monoclonal antibody that binds to PDL1, and inhibits interaction of the ligand with PD1. MDPL3280A (Genentech/Roche) is a human Fc optimized IgG1 monoclonal antibody that binds to PD-L1. MDPL3280A and other human monoclonal antibodies to PD-L1 are disclosed in U.S. Pat. No. 7,943,743 and U.S Publication No.: 20120039906. Other anti-PD-L1 binding agents include YW243.55.570 (heavy and light chain variable regions are shown in SEQ ID NOs 20 and 21 in WO2010/077634) and MDX-1 105 (also referred to as BMS-936559, and, e.g., anti-PD-L1 binding agents disclosed in WO2007/005874). AMP-224 (B7-DCIg; Amplimmune; e.g., disclosed in WO2010/027827 and WO2011/066342), is a PD-L2 Fc fusion soluble receptor that blocks the interaction between PD-1 and B7-H1. Other anti-PD-1 antibodies include AMP 514 (Amplimmune), among others, e.g., anti-PD-1 antibodies disclosed in U.S. Pat. No. 8,609,089, US 2010028330, and/or US 20120114649.

[0817] TIM3 (T cell immunoglobulin-3) also negatively regulates T cell function, particularly in IFN-g-secreting CD4+ T helper 1 and CD8+ T cytotoxic 1 cells, and plays a critical role in T cell exhaustion. Inhibition of the interaction between TIM3 and its ligands, e.g., galectin-9 (Gal9), phosphotidylserine (PS), and HMGB1, can increase immune response. Antibodies, antibody fragments, and other inhibitors of TIM3 and its ligands are available in the art and may be used combination with a CD19 or BCMA CAR described herein. For example, antibodies, antibody fragments, small molecules, or peptide inhibitors that target TIM3 binds to the IgV domain of TIM3 to inhibit interaction with its ligands. Antibodies and peptides that inhibit TIM3 are disclosed in WO2013/006490 and US20100247521. Other anti-TIM3 antibodies include humanized versions of RMT3-23 (disclosed in Ngiow et al., 2011, Cancer Res, 71:3540-3551), and clone 8B.2C12 (disclosed in Monney et al., 2002, Nature, 415:536-541). Bi-specific antibodies that inhibit TIM3 and PD-1 are disclosed in US20130156774.

[0818] In other embodiments, the agent which enhances the activity of a CAR-expressing cell is a CEACAM inhibitor (e.g., CEACAM-1, CEACAM-3, and/or CEACAM-5 inhibitor). In one embodiment, the inhibitor of CEACAM is an anti-CEACAM antibody molecule. Exemplary anti-CEACAM-1 antibodies are described in WO 2010/125571, WO 2013/082366 WO 2014/059251 and WO 2014/022332, e.g., a monoclonal antibody 34B1, 26H7, and 5F4; or a recombinant form thereof, as described in, e.g., US 2004/0047858, U.S. Pat. No. 7,132,255 and WO 99/052552. In other embodiments, the anti-CEACAM antibody binds to CEACAM-5 as described in, e.g., Zheng et al. PLoS One. 2010 Sep. 2; 5(9). pii: e12529 (DOI: 10:1371/journal.pone.0021146), or crossreacts with CEACAM-1 and CEACAM-5 as described in, e.g., WO 2013/054331 and US 2014/0271618.

[0819] Without wishing to be bound by theory, carcinoembryonic antigen cell adhesion molecules (CEACAM), such as CEACAM-1 and CEACAM-5, are believed to mediate, at least in part, inhibition of an anti-tumor immune response (see e.g., Markel et al. J Immunol. 2002 Mar. 15; 168(6):2803-10; Markel et al. J Immunol. 2006 Nov. 1; 177(9):6062-71; Markel et al. Immunology. 2009 February; 126(2):186-200; Markel et al. Cancer Immunol Immunother. 2010 February; 59(2):215-30; Ortenberg et al. Mol Cancer Ther. 2012 June; 11(6):1300-10; Stern et al. J Immunol. 2005 Jun. 1; 174(11):6692-701; Zheng et al. PLoS One. 2010 Sep. 2; 5(9). pii: e12529). For example, CEACAM-1 has been described as a heterophilic ligand for TIM-3 and as playing a role in TIM-3-mediated T cell tolerance and exhaustion (see e.g., WO 2014/022332; Huang, et al. (2014) Nature doi:10.1038/nature13848). In embodiments, co-blockade of CEACAM-1 and TIM-3 has been shown to enhance an anti-tumor immune response in xenograft colorectal cancer models (see e.g., WO 2014/022332; Huang, et al. (2014), supra). In other embodiments, co-blockade of CEACAM-1 and PD-1 reduce T cell tolerance as described, e.g., in WO 2014/059251. Thus, CEACAM inhibitors can be used with the other immunomodulators described herein (e.g., anti-PD-1 and/or anti-TIM-3 inhibitors) to enhance an immune response against a cancer, e.g., a melanoma, a lung cancer (e.g., NSCLC), a bladder cancer, a colon cancer an ovarian cancer, and other cancers as described herein.

[0820] LAG3 (lymphocyte activation gene-3 or CD223) is a cell surface molecule expressed on activated T cells and B cells that has been shown to play a role in CD8+ T cell exhaustion. Antibodies, antibody fragments, and other inhibitors of LAG3 and its ligands are available in the art and may be used combination with a CD19 or BCMA CAR described herein. For example, BMS-986016 (Bristol-Myers Squib) is a monoclonal antibody that targets LAW. IMP701 (Immutep) is an antagonist LAG3 antibody and IMP731 (Immutep and GlaxoSmithKline) is a depleting LAG3 antibody. Other LAG3 inhibitors include IMP321 (Immutep), which is a recombinant fusion protein of a soluble portion of LAG3 and Ig that binds to MHC class II molecules and activates antigen presenting cells (APC). Other antibodies are disclosed, e.g., in WO2010/019570.

[0821] In some embodiments, the agent which enhances the activity of a CAR-expressing cell can be, e.g., a fusion protein comprising a first domain and a second domain, wherein the first domain is an inhibitory molecule, or fragment thereof, and the second domain is a polypeptide that is associated with a positive signal, e.g., a polypeptide comprising an antracellular signaling domain as described herein. In some embodiments, the polypeptide that is associated with a positive signal can include a costimulatory domain of CD28, CD27, ICOS, e.g., an intracellular signaling domain of CD28, CD27 and/or ICOS, and/or a primary signaling domain, e.g., of CD3 zeta, e.g., described herein. In one embodiment, the fusion protein is expressed by the same cell that expressed the CAR. In another embodiment, the fusion protein is expressed by a cell, e.g., a T cell or NK cell that does not express an anti-BCMA CAR.

[0822] In one embodiment, the agent which enhances activity of a CAR-expressing cell described herein is miR-17-92.

[0823] In one embodiment, the agent which enhances activity of a CAR-described herein is a cytokine. Cytokines have important functions related to T cell expansion, differentiation, survival, and homeostatis. Cytokines that can be administered to the subject receiving a CAR-expressing cell described herein include: IL-2, IL-4, IL-7, IL-9, IL-15, IL-18, and IL-21, or a combination thereof. In preferred embodiments, the cytokine administered is IL-7, IL-15, or IL-21, or a combination thereof. The cytokine can be administered once a day or more than once a day, e.g., twice a day, three times a day, or four times a day. The cytokine can be administered for more than one day, e.g. the cytokine is administered for 2 days, 3 days, 4 days, 5 days, 6 days, 1 week, 2 weeks, 3 weeks, or 4 weeks. For example, the cytokine is administered once a day for 7 days.

[0824] In embodiments, the cytokine is administered in combination with CAR-expressing T cells. The cytokine can be administered simultaneously or concurrently with the CAR-expressing T cells, e.g., administered on the same day. The cytokine may be prepared in the same pharmaceutical composition as the CAR-expressing T cells, or may be prepared in a separate pharmaceutical composition. Alternatively, the cytokine can be administered shortly after administration of the CAR-expressing T cells, e.g., 1 day, 2 days, 3 days, 4 days, 5 days, 6 days, or 7 days after administration of the CAR-expressing T cells. In embodiments where the cytokine is administered in a dosing regimen that occurs over more than one day, the first day of the cytokine dosing regimen can be on the same day as administration with the CAR-expressing T cells, or the first day of the cytokine dosing regimen can be 1 day, 2 days, 3 days, 4 days, 5 days, 6 days, or 7 days after administration of the CAR-expressing T cells. In one embodiment, on the first day, the CAR-expressing T cells are administered to the subject, and on the second day, a cytokine is administered once a day for the next 7 days. In a preferred embodiment, the cytokine to be administered in combination with CAR-expressing T cells is IL-7, IL-15, or IL-21.

[0825] In other embodiments, the cytokine is administered a period of time after administration of CAR-expressing cells, e.g., at least 2 weeks, 3 weeks, 4 weeks, 6 weeks, 8 weeks, 10 weeks, 12 weeks, 4 months, 5 months, 6 months, 7 months, 8 months, 9 months, 10 months, 11 months, or 1 year or more after administration of CAR-expressing cells. In one embodiment, the cytokine is administered after assessment of the subject's response to the CAR-expressing cells. For example, the subject is administered CAR-expressing cells according to the dosage and regimens described herein. The response of the subject to CAR-expressing cell therapy is assessed at 2 weeks, 3 weeks, 4 weeks, 6 weeks, 8 weeks, 10 weeks, 12 weeks, 4 months, 5 months, 6 months, 7 months, 8 months, 9 months, 10 months, 11 months, or 1 year or more after administration of CAR-expressing cells, using any of the methods described herein, including inhibition of tumor growth, reduction of circulating tumor cells, or tumor regression. Subjects that do not exhibit a sufficient response to CAR-expressing cell therapy can be administered a cytokine. Administration of the cytokine to the subject that has sub-optimal response to the CAR-expressing cell therapy improves CAR-expressing cell efficacy or anti-cancer activity. In a preferred embodiment, the cytokine administered after administration of CAR-expressing cells is IL-7.

[0826] Combination with a Low, Immune Enhancing, Dose of an mTOR Inhibitor

[0827] Methods described herein use low, immune enhancing, doses of mTOR inhibitors, e.g., allosteric mTOR inhibitors, including rapalogs such as RAD001. Administration of a low, immune enhancing, dose of an mTOR inhibitor (e.g., a dose that is insufficient to completely suppress the immune system, but sufficient to improve immune function) can optimize the performance of immune effector cells, e.g., T cells or CAR-expressing cells, in the subject. Methods for measuring mTOR inhibition, dosages, treatment regimens, and suitable pharmaceutical compositions are described in U.S. Patent Application No. 2015/01240036, hereby incorporated by reference.

[0828] In an embodiment, administration of a low, immune enhancing, dose of an mTOR inhibitor results in one or more of the following:
[0829] i) a decrease in the number of PD-1 positive immune effector cells;
[0830] ii) an increase in the number of PD-1 negative immune effector cells;
[0831] iii) an increase in the ratio of PD-1 negative immune effector cells/PD-1 positive immune effector cells;
[0832] iv) an increase in the number of naive T cells;
[0833] v) an increase in the expression of one or more of the following markers: CD62L^{high}, CD127^{high}, CD27⁺, and BCL2, e.g., on memory T cells, e.g., memory T cell precursors;
[0834] vi) a decrease in the expression of KLRG1, e.g., on memory T cells, e.g., memory T cell precursors; or
[0835] vii) an increase in the number of memory T cell precursors, e.g., cells with any one or combination of the following characteristics: increased CD62L^{high} increased CD127^{high} increased CD27⁺, decreased KLRG1, and increased BCL2;

[0836] and wherein any of the foregoing, e.g., i), ii), iii), iv), v), vi), or vii), occurs e.g., at least transiently, e.g., as compared to a non-treated subject.

[0837] In another embodiment, administration of a low, immune enhancing, dose of an mTOR inhibitor results in increased or prolonged proliferation or persistence of CAR-expressing cells, e.g., in culture or in a subject, e.g., as compared to non-treated CAR-expressing cells or a non-treated subject. In embodiments, increased proliferation or persistence is associated with in an increase in the number of CAR-expressing cells. Methods for measuring increased or prolonged proliferation are described in Examples 15 and 16. In another embodiment, administration of a low, immune enhancing, dose of an mTOR inhibitor results in increased killing of cancer cells by CAR-expressing cells, e.g., in culture or in a subject, e.g., as compared to non-treated CAR-expressing cells or a non-treated subject. In embodiments, increased killing of cancer cells is associated with in a decrease in tumor volume. Methods for measuring increased killing of cancer cells are described herein, e.g., in Examples 2, 5-6, 8, and 13. In one embodiment, the cells expressing a CAR molecule, e.g., a CAR molecule described herein, are administered in combination with a low, immune enhancing dose of an mTOR inhibitor, e.g., an allosteric mTOR inhibitor, e.g., RAD001, or a catalytic mTOR inhibitor. For example, administration of the low, immune enhancing, dose of the mTOR inhibitor can be initiated prior to administration of a CAR-expressing cell described herein; completed prior to administration of a CAR-expressing cell described herein; initiated at the same time as administration of a CAR-expressing cell described herein; overlapping with administration of a CAR-expressing cell described herein; or continuing after administration of a CAR-expressing cell described herein.

[0838] Alternatively or in addition, administration of a low, immune enhancing, dose of an mTOR inhibitor can optimize immune effector cells to be engineered to express a CAR molecule described herein. In such embodiments, administration of a low, immune enhancing, dose of an mTOR inhibitor, e.g., an allosteric inhibitor, e.g., RAD001, or a catalytic inhibitor, is initiated or completed prior to harvest of immune effector cells, e.g., T cells or NK cells, to be engineered to express a CAR molecule described herein, from a subject.

[0839] In another embodiment, immune effector cells, e.g., T cells or NK cells, to be engineered to express a CAR molecule described herein, e.g., after harvest from a subject, or CAR-expressing immune effector cells, e.g., T cells or NK cells, e.g., prior to administration to a subject, can be cultured in the presence of a low, immune enhancing, dose of an mTOR inhibitor.

[0840] In an embodiment, administering to the subject a low, immune enhancing, dose of an mTOR inhibitor comprises administering, e.g., once per week, e.g., in an immediate release dosage form, 0.1 to 20, 0.5 to 10, 2.5 to 7.5, 3 to 6, or about 5, mgs of RAD001, or a bioequivalent dose thereof. In an embodiment, administering to the subject a low, immune enhancing, dose of an mTOR inhibitor comprises administering, e.g., once per week, e.g., in a sustained release dosage form, 0.3 to 60, 1.5 to 30, 7.5 to 22.5, 9 to 18, or about 15 mgs of RAD001, or a bioequivalent dose thereof.

[0841] In an embodiment, a dose of an mTOR inhibitor is associated with, or provides, mTOR inhibition of at least 5 but no more than 90%, at least 10 but no more than 90%, at least 15, but no more than 90%, at least 20 but no more than 90%, at least 30 but no more than 90%, at least 40 but no more than 90%, at least 50 but no more than 90%, at least 60 but no more than 90%, at least 70 but no more than 90%, at least 5 but no more than 80%, at least 10 but no more than 80%, at least 15, but no more than 80%, at least 20 but no more than 80%, at least 30 but no more than 80%, at least 40 but no more than 80%, at least 50 but no more than 80%, at least 60 but no more than 80%, at least 5 but no more than 70%, at least 10 but no more than 70%, at least 15, but no more than 70%, at least 20 but no more than 70%, at least 30 but no more than 70%, at least 40 but no more than 70%, at least 50 but no more than 70%, at least 5 but no more than 60%, at least 10 but no more than 60%, at least 15, but no more than 60%, at least 20 but no more than 60%, at least 30 but no more than 60%, at least 40 but no more than 60%, at least 5 but no more than 50%, at least 10 but no more than 50%, at least 15, but no more than 50%, at least 20 but no more than 50%, at least 30 but no more than 50%, at least 40 but no more than 50%, at least 5 but no more than 40%, at least 10 but no more than 40%, at least 15, but no more than 40%, at least 20 but no more than 40%, at least 30 but no more than 40%, at least 35 but no more than 40%, at least 5 but no more than 30%, at least 10 but no more than 30%, at least 15, but no more than 30%, at least 20 but no more than 30%, or at least 25 but no more than 30%.

[0842] In an embodiment, administering to the subject a low, immune enhancing, dose of an mTOR inhibitor comprises administering, e.g., once per week, e.g., in an immediate release dosage form, 0.1 to 20, 0.5 to 10, 2.5 to 7.5, 3 to 6, or about 5, mgs of RAD001, or a bioequivalent dose thereof. In an embodiment, administering to the subject a low, immune enhancing, dose of an mTOR inhibitor comprises administering, e.g., once per week, e.g., in a sustained release dosage form, 0.3 to 60, 1.5 to 30, 7.5 to 22.5, 9 to 18, or about 15 mgs of RAD001, or a bioequivalent dose thereof.

[0843] The extent of mTOR inhibition can be conveyed as, or corresponds to, the extent of P70 S6 kinase inhibition, e.g., the extent of mTOR inhibition can be determined by the level of decrease in P70 S6 kinase activity, e.g., by the decrease in phosphorylation of a P70 S6 kinase substrate. The level of mTOR inhibition can be evaluated by various methods, such as measuring P70 S6 kinase activity by the Boulay assay, as described in U.S. Patent Application No. 2015/01240036, hereby incorporated by reference, or as described in U.S. Pat. No. 7,727,950, hereby incorporated by reference; measuring the level of phosphorylated S6 by western blot; or evaluating a change in the ratio of PD1 negative immune effector cells to PD1 positive immune effector cells.

[0844] As used herein, the term “mTOR inhibitor” refers to a compound or ligand, or a pharmaceutically acceptable salt thereof, which inhibits the mTOR kinase in a cell. In an embodiment, an mTOR inhibitor is an allosteric inhibitor. Allosteric mTOR inhibitors include the neutral tricyclic compound rapamycin (sirolimus), rapamycin-related compounds, that is compounds having structural and functional similarity to rapamycin including, e.g., rapamycin derivatives, rapamycin analogs (also referred to as rapalogs) and other macrolide compounds that inhibit mTOR activity. In an embodiment, an mTOR inhibitor is a catalytic inhibitor.

[0845] Rapamycin is a known macrolide antibiotic produced by Streptomyces hygroscopicus having the structure shown in Formula A.

[chemical structure]

[0846] See, e.g., McAlpine, J. B., et al., J. Antibiotics (1991) 44: 688; Schreiber, S. L., et al., J. Am. Chem. Soc. (1991) 113: 7433; U.S. Pat. No. 3,929,992. There are various numbering schemes proposed for rapamycin. To avoid confusion, when specific rapamycin analogs are named herein, the names are given with reference to rapamycin using the numbering scheme of formula A.

[0847] Rapamycin analogs useful in the invention are, for example, 0-substituted analogs in which the hydroxyl group on the cyclohexyl ring of rapamycin is replaced by OR₁ in which R₁ is hydroxyalkyl, hydroxyalkoxyalkyl, acylaminoalkyl, or aminoalkyl; e.g. RAD001, also known as everolimus, as described in U.S. Pat. No. 5,665,772 and WO94/09010, the contents of each are incorporated by reference.

[0848] Other suitable rapamycin analogs include those substituted at the 26- or 28-position. The rapamycin analog may be an epimer of an analog mentioned above, particularly an epimer of an analog substituted in position 40, 28 or 26, and may optionally be further hydrogenated, e.g. as described in U.S. Pat. No. 6,015,815, WO95/14023 and WO99/15530 the contents of which are incorporated by reference, e.g. ABT578 also known as zotarolimus or a rapamycin analog described in U.S. Pat. No. 7,091,213, WO98/02441 and WO01/14387 the contents of which are incorporated by reference, e.g. AP23573 also known as ridaforolimus.

[0849] Examples of rapamycin analogs suitable for use in the present invention from U.S. Pat. No. 5,665,772 include, but are not limited to, 40-O-benzyl-rapamycin, 40-O-(4′-hydroxymethyl)benzyl-rapamycin, 40-O-[4′-(1,2-dihydroxyethyl)]benzyl-rapamycin, 40-O-allyl-rapamycin, 40-O-[3′-(2,2-dimethyl-1,3-dioxolan-4(S)-yl)-prop-2′-en-1′-yl]-rapamycin, (2′E,4'S)-40-O-(4′,5′-dihydroxypent-2′-en-1′-yl)-rapamycin, 40-O-(2-hydroxy)ethoxycarbonylmethyl-rapamycin, 40-O-(2-hydroxy)ethyl-rapamycin, 40-O-(3-hydroxy)propyl-rapamycin, 40-O-(6-hydroxy)hexyl-rapamycin, 40-0-[2-(2-hydroxy)ethoxy]ethyl-rapamycin, 40-O-[(35)-2,2-dimethyldioxolan-3-yl]methyl-rapamycin, 40-O-[(2S)-2,3-dihydroxyprop-1-yl]-rapamycin, 40-O-(2-acetoxy)ethyl-rapamycin, 40-O-(2-nicotinoyloxy)ethyl-rapamycin, 40-O-[2-(N-morpholino)acetoxy]ethyl-rapamycin, 40-O-(2-N-imidazolylacetoxy)ethyl-rapamycin, 40-O-[2-(N-methyl-N′-piperazinyl)acetoxy]ethyl-rapamycin, 39-O-desmethyl-39,40-O,O-ethylene-rapamycin, (26R)-26-dihydro-40-O-(2-hydroxy)ethyl-rapamycin, 40-O-(2-aminoethyl)-rapamycin, 40-O-(2-acetaminoethyl)-rapamycin, 40-O-(2-nicotinamidoethyl)-rapamycin, 40-O-(2-(N-methyl-imidazo-2′-ylcarbethoxamido)ethyl)-rapamycin, 40-O-(2-ethoxycarbonylaminoethyl)-rapamycin, 40-O-(2-tolylsulfonamidoethyl)-rapamycin and 40-O-[2-(4′,5′-dicarboethoxy-1′,2′,3′-triazol-1′-yl)-ethyl]-rapamycin.

[0850] Other rapamycin analogs useful in the present invention are analogs where the hydroxyl group on the cyclohexyl ring of rapamycin and/or the hydroxy group at the 28 position is replaced with an hydroxyester group are known, for example, rapamycin analogs found in US RE44,768, e.g. temsirolimus.

[0851] Other rapamycin analogs useful in the preset invention include those wherein the methoxy group at the 16 position is replaced with another substituent, preferably (optionally hydroxy-substituted) alkynyloxy, benzyl, orthomethoxybenzyl or chlorobenzyl and/or wherein the mexthoxy group at the 39 position is deleted together with the 39 carbon so that the cyclohexyl ring of rapamycin becomes a cyclopentyl ring lacking the 39 position methyoxy group; e.g. as described in WO95/16691 and WO96/41807, the contents of which are incorporated by reference. The analogs can be further modified such that the hydroxy at the 40-position of rapamycin is alkylated and/or the 32-carbonyl is reduced.

[0852] Rapamycin analogs from WO95/16691 include, but are not limited to, 16-demthoxy-16-(pent-2-ynyl)oxy-rapamycin, 16-demthoxy-16-(but-2-ynyl)oxy-rapamycin, 16-demthoxy-16-(propargyl)oxy-rapamycin, 16-demethoxy-16-(4-hydroxy-but-2-ynyl)oxy-rapamycin, 16-demthoxy-16-benzyloxy-40-O-(2-hydroxyethyl)-rapamycin, 16-demthoxy-16-benzyloxy-rapamycin, 16-demethoxy-16-ortho-methoxybenzyl-rapamycin, 16-demethoxy-40-O-(2-methoxyethyl)-16-pent-2-ynyl)oxy-rapamycin, 39-demethoxy-40-desoxy-39-formyl-42-nor-rapamycin, 39-demethoxy-40-desoxy-39-hydroxymethyl-42-nor-rapamycin, 39-demethoxy-40-desoxy-39-carboxy-42-nor-rapamycin, 39-demethoxy-40-desoxy-39-(4-methyl-piperazin-1-yl)carbonyl-42-nor-rapamycin, 39-demethoxy-40-desoxy-39-(morpholin-4-yl)carbonyl-42-nor-rapamycin, 39-demethoxy-40-desoxy-39-[N-methyl, N-(2-pyridin-2-yl-ethyl)]carbamoyl-42-nor-rapamycin and 39-demethoxy-40-desoxy-39-(p-toluenesulfonylhydrazonomethyl)-42-nor-rapamycin.

[0853] Rapamycin analogs from WO96/41807 include, but are not limited to, 32-deoxo-rapamycin, 16-O-pent-2-ynyl-32-deoxo-rapamycin, 16-O-pent-2-ynyl-32-deoxo-40-O-(2-hydroxy-ethyl)-rapamycin, 16-O-pent-2-ynyl-32-(S)-dihydro-40-O-(2-hydroxyethyl)-rapamycin, 32(S)-dihydro-40-O-(2-methoxy)ethyl-rapamycin and 32(S)-dihydro-40-O-(2-hydroxyethyl)-rapamycin.

[0854] Another suitable rapamycin analog is umirolimus as described in US2005/0101624 the contents of which are incorporated by reference.

[0855] RAD001, otherwise known as everolimus (Afinitor®), has the chemical name (1R,9S,12S,15R,16E,18R,19R,21R,23S,24E,26E,28E,30S,32S,35R)-1,18-dihydroxy-12-{(1R)-2-[(1S,3R,4R)-4-(2-hydroxyethoxy)-3-methoxycyclohexyl]-1-methylethyl}-19,30-dimethoxy-15,17,21,23,29,35-hexamethyl-11,36-dioxa-4-aza-tricyclo[30.3.1.04,9]hexatriaconta-16,24,26,28-tetraene-2,3,10,14,20-pentaone, as described in U.S. Pat. No. 5,665,772 and WO94/09010, the contents of each are incorporated by reference.

[0856] Further examples of allosteric mTOR inhibitors include sirolimus (rapamycin, AY-22989), 40-[3-hydroxy-2-(hydroxymethyl)-2-methylpropanoate]-rapamycin (also called temsirolimus or CCI-779) and ridaforolimus (AP-23573/MK-8669). Other examples of allosteric mTor inhibitors include zotarolimus (ABT578) and umirolimus.

[0857] Alternatively or additionally, catalytic, ATP-competitive mTOR inhibitors have been found to target the mTOR kinase domain directly and target both mTORC1 and mTORC2. These are also more effective inhibitors of mTORC1 than such allosteric mTOR inhibitors as rapamycin, because they modulate rapamycin-resistant mTORC1 outputs such as 4EBP1-T37/46 phosphorylation and cap-dependent translation.

[0858] Catalytic inhibitors include: BEZ235 or 2-methyl-2-[4-(3-methyl-2-oxo-8-quinolin-3-yl-2,3-dihydro-imidazo[4,5-c]quinolin-1-yl)-phenyl]-propionitrile, or the monotosylate salt form (the synthesis of BEZ235 is described in WO2006/122806); CCG168 (otherwise known as AZD-8055, Chresta, C. M., et al., Cancer Res, 2010, 70(1), 288-298) which has the chemical name {5-[2,4-bis-((S)-3-methyl-morpholin-4-yl)-pyrido[2,3d]pyrimidin-7-yl]-2-methoxyphenyl}-methanol; 3-[2,4-bis[(35)-3-methylmorpholin-4-yl]pyrido[2,3-d]pyrimidin-7-yl]-N-methylbenzamide (WO09104019); 3-(2-aminobenzo[d]oxazol-5-yl)-1-isopropyl-1H-pyrazolo[3,4-d]pyrimidin-4-amine (WO10051043 and WO2013023184); A N-(3-(N-(3-((3,5-dimethoxyphenyl)amino)quinoxaline-2-yl)sulfamoyl)phenyl)-3-methoxy-4-methylbenzamide (WO07044729 and WO12006552); PKI-587 (Venkatesan, A. M., J. Med. Chem., 2010, 53, 2636-2645) which has the chemical name 1-[4-[4-(dimethylamino)piperidine-1-carbonyl]phenyl]-3-[4-(4,6-dimorpholino-1,3,5-triazin-2-yl)phenyl]urea; GSK-2126458 (ACS Med. Chem. Lett., 2010, 1, 39-43) which has the chemical name 2,4-difluoro-N-{2-methoxy-5-[4-(4-pyridazinyl)-6-quinolinyl]-3-pyridinyl}benzenesulfonamide; 5-(9-isopropyl-8-methyl-2-morpholino-9H-purin-6-yl)pyrimidin-2-amine (WO10114484); and (E)-N-(8-(6-amino-5-(trifluoromethyl)pyridin-3-yl)-1-(6-(2-cyanopropan-2-yl)pyridin-3-yl)-3-methyl-1H-imidazo[4,5-c]quinolin-2(3H)-ylidene) cyanamide (WO12007926).

[0859] Further examples of catalytic mTOR inhibitors include 8-(6-methoxy-pyridin-3-yl)-3-methyl-1-(4-piperazin-1-yl-3-trifluoromethyl-phenyl)-1,3-dihydro-imidazo[4,5-c]quinolin-2-one (WO2006/122806) and Ku-0063794 (Garcia-Martinez J M, et al., Biochem J., 2009, 421(1), 29-42. Ku-0063794 is a specific inhibitor of the mammalian target of rapamycin (mTOR).) WYE-354 is another example of a catalytic mTOR inhibitor (Yu K, et al. (2009). Biochemical, Cellular, and In vivo Activity of Novel ATP-Competitive and Selective Inhibitors of the Mammalian Target of Rapamycin. Cancer Res. 69(15): 6232-6240).

[0860] mTOR inhibitors useful according to the present invention also include prodrugs, derivatives, pharmaceutically acceptable salts, or analogs thereof of any of the foregoing.

[0861] mTOR inhibitors, such as RAD001, may be formulated for delivery based on well-established methods in the art based on the particular dosages described herein. In particular, U.S. Pat. No. 6,004,973 (incorporated herein by reference) provides examples of formulations useable with the mTOR inhibitors described herein.

### Methods and Biomarkers for Evaluating CAR-Effectiveness or Sample Suitability

[0862] In another aspect, the invention features a method of evaluating or monitoring the effectiveness of a CAR-expressing cell therapy (e.g., a BCMACAR therapy), in a subject (e.g., a subject having a cancer, e.g., a hematological cancer), or the suitability of a sample (e.g., an apheresis sample) for a CAR therapy (e.g., a BCMACAR therapy). The method includes acquiring a value of effectiveness to the CAR therapy, or sample suitability, wherein said value is indicative of the effectiveness or suitability of the CAR-expressing cell therapy.

[0863] In embodiments, the value of effectiveness to the CAR therapy, or sample suitability, comprises a measure of one, two, three, four, five, six or more (all) of the following:

[0864] (i) the level or activity of one, two, three, or more (e.g., all) of resting T_{EFF} cells, resting T_{REG} cells, younger T cells (e.g., younger CD4 or CD8 cells, or gamma/delta T cells), or early memory T cells, or a combination thereof, in a sample (e.g., an apheresis sample or a manufactured CAR-expressing cell product sample);

[0865] (ii) the level or activity of one, two, three, or more (e.g., all) of activated T_{EFF} cells, activated T_{REG} cells, older T cells (e.g., older CD4 or CD8 cells), or late memory T cells, or a combination thereof, in a sample (e.g., an apheresis sample or a manufactured CAR-expressing cell product sample);

[0866] (iii) the level or activity of an immune cell exhaustion marker, e.g., one, two or more immune checkpoint inhibitors (e.g., PD-1, PD-L1, TIM-3 and/or LAG-3) in a sample (e.g., an apheresis sample or a manufactured CAR-expressing cell product sample). In one embodiment, an immune cell has an exhausted phenotype, e.g., co-expresses at least two exhaustion markers, e.g., co-expresses PD-1 and TIM-3. In other embodiments, an immune cell has an exhausted phenotype, e.g., co-expresses at least two exhaustion markers, e.g., co-expresses PD-1 and LAG-3;

[0867] (iv) the level or activity of CD27 and/or CD45RO− (e.g., CD27+ CD45RO−) immune effector cells, e.g., in a CD4+ or a CD8+ T cell population, in a sample (e.g., an apheresis sample or a manufactured CAR-expressing cell product sample);

[0868] (v) the level or activity of one, two, three, four, five, ten, twenty or more of the biomarkers chosen from CCL20, IL-17a and/or IL-6, PD-1, PD-L1, LAG-3, TIM-3, CD57, CD27, CD122, CD62L, KLRG1;

[0869] (vi) a cytokine level or activity (e.g., quality of cytokine reportoire) in a CAR-expressing cell product sample, e.g., BCMA-expressing cell product sample; or

[0870] (vii) a transduction efficiency of a CAR-expressing cell in a manufactured CAR-expressing cell product sample.

[0871] In some embodiments of any of the methods disclosed herein, the CAR-expressing cell therapy comprises a plurality (e.g., a population) of CAR-expressing immune effector cells, e.g., a plurality (e.g., a population) of T cells or NK cells, or a combination thereof. In one embodiment, the CAR-expressing cell therapy is a BCMACAR therapy.

[0872] In some embodiments of any of the methods disclosed herein, the measure of one or more of (i)-(vii) is obtained from an apheresis sample acquired from the subject. The apheresis sample can be evaluated prior to infusion or re-infusion.

[0873] In some embodiments of any of the methods disclosed herein, the measure of one or more of (i)-(vii) is obtained from a manufactured CAR-expressing cell product sample, e.g., BCMACAR-expressing cell product sample. The manufactured CAR-expressing cell product can be evaluated prior to infusion or re-infusion.

[0874] In some embodiments of any of the methods disclosed herein, the subject is evaluated prior to receiving, during, or after receiving, the CAR-expressing cell therapy.

[0875] In some embodiments of any of the methods disclosed herein, the measure of one or more of (i)-(vii) evaluates a profile for one or more of gene expression, flow cytometry or protein expression.

[0876] In some embodiments of any of the methods disclosed herein, the method further comprises identifying the subject as a responder, a non-responder, a relapser or a non-relapser, based on a measure of one or more of (i)-(vii).

[0877] In some embodiments of any of the methods disclosed herein, a responder (e.g., a complete responder) has, or is identified as having, a greater level or activity of one, two, or more (all) of GZMK, PPF1BP2, or naïve T cells as compared to a non-responder.

[0878] In some embodiments of any of the methods disclosed herein, a non-responder has, or is identified as having, a greater level or activity of one, two, three, four, five, six, seven, or more (e.g., all) of IL22, IL-2RA, IL-21, IRF8, IL8, CCL17, CCL22, effector T cells, or regulatory T cells, as compared to a responder.

[0879] In an embodiment, a relapser is a patient having, or who is identified as having, an increased level of expression of one or more of (e.g., 2, 3, 4, or all of) the following genes, compared to non relapsers: MIR199A1, MIR1203, uc021ovp, ITM2C, and HLA-DQB1 and/or a decreased levels of expression of one or more of (e.g., 2, 3, 4, 5, 6, 7, 8, 9, 10, 11, or all of) the following genes, compared to non relapsers: PPIAL4D, TTTY10, TXLNG2P, MIR4650-1, KDM5D, USP9Y, PRKY, RPS4Y2, RPS4Y1, NCRNA00185, SULT1E1, and EIF1AY.

[0880] In some embodiments of any of the methods disclosed herein, a complete responder has, or is identified as having, a greater, e.g., a statistically significant greater, percentage of CD8+ T cells compared to a reference value, e.g., a non-responder percentage of CD8+ T cells.

[0881] In some embodiments of any of the methods disclosed herein, a complete responder has, or is identified as having, a greater percentage of CD27+CD45RO− immune effector cells, e.g., in the CD8+ population, compared to a reference value, e.g., a non-responder number of CD27+CD45RO− immune effector cells.

[0882] In some embodiments of any of the methods disclosed herein, a complete responder or a partial responder has, or is identified as having, a greater, e.g., a statistically significant greater, percentage of CD4+ T cells compared to a reference value, e.g., a non-responder percentage of CD4+ T cells.

[0883] In some embodiments of any of the methods disclosed herein, a complete responder has, or is identified as having, a greater percentage of one, two, three, or more (e.g., all) of resting T_{EFF} cells, resting T_{REG} cells, younger T cells (e.g., younger CD4 or CD8 cells, or gamma/delta T cells), or early memory T cells, or a combination thereof, compared to a reference value, e.g., a non-responder number of resting T_{EFF} cells, resting T_{REG} cells, younger T cells (e.g., younger CD4 or CD8 cells), or early memory T cells.

[0884] In some embodiments of any of the methods disclosed herein, a non-responder has, or is identified as having, a greater percentage of one, two, three, or more (e.g., all) of activated T_{EFF} cells, activated T_{REG} cells, older T cells (e.g., older CD4 or CD8 cells), or late memory T cells, or a combination thereof, compared to a reference value, e.g., a responder number of activated T_{EFF} cells, activated T_{REG} cells, older T cells (e.g., older CD4 or CD8 cells), or late memory T cells.

[0885] In some embodiments of any of the methods disclosed herein, a non-responder has, or is identified as having, a greater percentage of an immune cell exhaustion marker, e.g., one, two or more immune checkpoint inhibitors (e.g., PD-1, PD-L1, TIM-3 and/or LAG-3). In one embodiment, a non-responder has, or is identified as having, a greater percentage of PD-1, PD-L1, or LAG-3 expressing immune effector cells (e.g., CD4+ T cells and/or CD8+ T cells) (e.g., CAR-expressing CD4+ cells and/or CD8+ T cells) compared to the percentage of PD-1 or LAG-3 expressing immune effector cells from a responder.

[0886] In one embodiment, a non-responder has, or is identified as having, a greater percentage of immune cells having an exhausted phenotype, e.g., immune cells that co-express at least two exhaustion markers, e.g., co-expresses PD-1, PD-L1 and/or TIM-3. In other embodiments, a non-responder has, or is identified as having, a greater percentage of immune cells having an exhausted phenotype, e.g., immune cells that co-express at least two exhaustion markers, e.g., co-expresses PD-1 and LAG-3.

[0887] In some embodiments of any of the methods disclosed herein, a non-responder has, or is identified as having, a greater percentage of PD-1/PD-L1+/LAG-3+ cells in the CAR-expressing cell population (e.g., a BCMACAR+ cell population) compared to a responder (e.g., a complete responder) to the CAR-expressing cell therapy.

[0888] In some embodiments of any of the methods disclosed herein, a partial responder has, or is identified as having, a higher percentages of PD-1/PD-L1+/LAG-3+ cells, than a responder, in the CAR-expressing cell population (e.g., a BCMACAR+ cell population).

[0889] In some embodiments of any of the methods disclosed herein, a non-responder has, or is identified as having, an exhausted phenotype of PD1/PD-L1+CAR+ and co-expression of LAG3 in the CAR-expressing cell population (e.g., a BCMACAR+ cell population).

[0890] In some embodiments of any of the methods disclosed herein, a non-responder has, or is identified as having, a greater percentage of PD-1/PD-L1+/TIM-3+ cells in the CAR-expressing cell population (e.g., a BCMACAR+ cell population) compared to the responder (e.g., a complete responder).

[0891] In some embodiments of any of the methods disclosed herein, a partial responders has, or is identified as having, a higher percentage of PD-1/PD-L1+/TIM-3+ cells, than responders, in the CAR-expressing cell population (e.g., a BCMACAR+ cell population).

[0892] In some embodiments of any of the methods disclosed herein, the presence of CD8+CD27+CD45RO− T cells in an apheresis sample is a positive predictor of the subject response to a CAR-expressing cell therapy (e.g., a BCMACAR therapy).

[0893] In some embodiments of any of the methods disclosed herein, a high percentage of PD1+CAR+ and LAG3+ or TIM3+ T cells in an apheresis sample is a poor prognostic predictor of the subject response to a CAR-expressing cell therapy (e.g., a BCMACAR therapy).

[0894] In some embodiments of any of the methods disclosed herein, the responder (e.g., the complete or partial responder) has one, two, three or more (or all) of the following profile:

[0895] (i) has a greater number of CD27+ immune effector cells compared to a reference value, e.g., a non-responder number of CD27+ immune effector cells;

[0896] (ii) (i) has a greater number of CD8+ T cells compared to a reference value, e.g., a non-responder number of CD8+ T cells;

[0897] (iii) has a lower number of immune cells expressing one or more checkpoint inhibitors, e.g., a checkpoint inhibitor chosen from PD-1, PD-L1, LAG-3, TIM-3, or KLRG-1, or a combination, compared to a reference value, e.g., a non-responder number of cells expressing one or more checkpoint inhibitors; or

[0898] (iv) has a greater number of one, two, three, four or more (all) of resting T_{EFF} cells, resting T_{REG} cells, naïve CD4 cells, unstimulated memory cells or early memory T cells, or a combination thereof, compared to a reference value, e.g., a non-responder number of resting T_{EFF} cells, resting T_{REG} cells, naïve CD4 cells, unstimulated memory cells or early memory T cells.

[0899] In some embodiments of any of the methods disclosed herein, the cytokine level or activity of (vi) is chosen from one, two, three, four, five, six, seven, eight, or more (or all) of cytokine CCL20/MIP3a, IL17A, IL6, GM-CSF, IFNγ, IL10, IL13, IL2, IL21, IL4, IL5, IL9 or TNFα, or a combination thereof. The cytokine can be chosen from one, two, three, four or more (all) of IL-17a, CCL20, IL2, IL6, or TNFα. In one embodiment, an increased level or activity of a cytokine is chosen from one or both of IL-17a and CCL20, is indicative of increased responsiveness or decreased relapse.

[0900] In some embodiments of any of the methods disclosed herein, a transduction efficiency of 15% or higher in (vii) is indicative of increased responsiveness or decreased relapse.

[0901] In some embodiments of any of the methods disclosed herein, a transduction efficiency of less than 15% in (vii) is indicative of decreased responsiveness or increased relapse.

[0902] In embodiments, the responder, a non-responder, a relapser or a non-relapser identified by the methods herein can be further evaluated according to clinical criteria. For example, a complete responder has, or is identified as, a subject having a disease, e.g., a cancer, who exhibits a complete response, e.g., a complete remission, to a treatment. A complete response may be identified, e.g., using the NCCN Guidelines®, or Cheson et al, J Clin Oncol 17:1244 (1999) and Cheson et al., “Revised Response Criteria for Malignant Lymphoma”, J Clin Oncol 25:579-586 (2007) (both of which are incorporated by reference herein in their entireties), as described herein. A partial responder has, or is identified as, a subject having a disease, e.g., a cancer, who exhibits a partial response, e.g., a partial remission, to a treatment. A partial response may be identified, e.g., using the NCCN Guidelines®, or Cheson criteria as described herein. A non-responder has, or is identified as, a subject having a disease, e.g., a cancer, who does not exhibit a response to a treatment, e.g., the patient has stable disease or progressive disease. A non-responder may be identified, e.g., using the NCCN Guidelines®, or Cheson criteria as described herein.

[0903] Alternatively, or in combination with the methods disclosed herein, responsive to said value, performing one, two, three four or more of:

[0904] administering e.g., to a responder or a non-relapser, a CAR-expressing cell therapy;

[0905] administered an altered dosing of a CAR-expressing cell therapy;

[0906] altering the schedule or time course of a CAR-expressing cell therapy;

[0907] administering, e.g., to a non-responder or a partial responder, an additional agent in combination with a CAR-expressing cell therapy, e.g., a checkpoint inhibitor, e.g., a checkpoint inhibitor described herein;

[0908] administering to a non-responder or partial responder a therapy that increases the number of younger T cells in the subject prior to treatment with a CAR-expressing cell therapy;

[0909] modifying a manufacturing process of a CAR-expressing cell therapy, e.g., enriching for younger T cells prior to introducing a nucleic acid encoding a CAR, or increasing the transduction efficiency, e.g., for a subject identified as a non-responder or a partial responder;

[0910] administering an alternative therapy, e.g., for a non-responder or partial responder or relapser; or

[0911] if the subject is, or is identified as, a non-responder or a relapser, decreasing the T_{REG} cell population and/or T_{REG} gene signature, e.g., by one or more of CD25 depletion, administration of cyclophosphamide, anti-GITR antibody, or a combination thereof.

[0912] In certain embodiments, the subject is pre-treated with an anti-GITR antibody. In certain embodiment, the subject is treated with an anti-GITR antibody prior to infusion or re-infusion.

### Biopolymer Delivery Methods

[0913] In some embodiments, one or more CAR-expressing cells as disclosed herein can be administered or delivered to the subject via a biopolymer scaffold, e.g., a biopolymer implant.

[0914] Biopolymer scaffolds can support or enhance the delivery, expansion, and/or dispersion of the CAR-expressing cells described herein. A biopolymer scaffold comprises a biocompatible (e.g., does not substantially induce an inflammatory or immune response) and/or a biodegradable polymer that can be naturally occurring or synthetic.

[0915] Examples of suitable biopolymers include, but are not limited to, agar, agarose, alginate, alginate/calcium phosphate cement (CPC), beta-galactosidase (β-GAL), (1,2,3,4,6-pentaacetyl a-D-galactose), cellulose, chitin, chitosan, collagen, elastin, gelatin, hyaluronic acid collagen, hydroxyapatite, poly(3-hydroxybutyrate-co-3-hydroxy-hexanoate) (PHBHHx), poly(lactide), poly(caprolactone) (PCL), poly(lactide-co-glycolide) (PLG), polyethylene oxide (PEO), poly(lactic-co-glycolic acid) (PLGA), polypropylene oxide (PPO), polyvinyl alcohol) (PVA), silk, soy protein, and soy protein isolate, alone or in combination with any other polymer composition, in any concentration and in any ratio. The biopolymer can be augmented or modified with adhesion- or migration-promoting molecules, e.g., collagen-mimetic peptides that bind to the collagen receptor of lymphocytes, and/or stimulatory molecules to enhance the delivery, expansion, or function, e.g., anti-cancer activity, of the cells to be delivered. The biopolymer scaffold can be an injectable, e.g., a gel or a semi-solid, or a solid composition.

[0916] In some embodiments, CAR-expressing cells described herein are seeded onto the biopolymer scaffold prior to delivery to the subject. In embodiments, the biopolymer scaffold further comprises one or more additional therapeutic agents described herein (e.g., another CAR-expressing cell, an antibody, or a small molecule) or agents that enhance the activity of a CAR-expressing cell, e.g., incorporated or conjugated to the biopolymers of the scaffold. In embodiments, the biopolymer scaffold is injected, e.g., intratumorally, or surgically implanted at the tumor or within a proximity of the tumor sufficient to mediate an anti-tumor effect. Additional examples of biopolymer compositions and methods for their delivery are described in Stephan et al., Nature Biotechnology, 2015, 33:97-101; and WO2014/110591.

### Pharmaceutical Compositions and Treatments

[0917] Pharmaceutical compositions of the present invention may comprise a CAR-expressing cell, e.g., a plurality of CAR-expressing cells, as described herein, in combination with one or more pharmaceutically or physiologically acceptable carriers, diluents or excipients. Such compositions may comprise buffers such as neutral buffered saline, phosphate buffered saline and the like; carbohydrates such as glucose, mannose, sucrose or dextrans, mannitol; proteins; polypeptides or amino acids such as glycine; antioxidants; chelating agents such as EDTA or glutathione; adjuvants (e.g., aluminum hydroxide); and preservatives. Compositions of the present invention are in one aspect formulated for intravenous administration.

[0918] Pharmaceutical compositions of the present invention may be administered in a manner appropriate to the disease to be treated (or prevented). The quantity and frequency of administration will be determined by such factors as the condition of the patient, and the type and severity of the patient's disease, although appropriate dosages may be determined by clinical trials.

[0919] In one embodiment, the pharmaceutical composition is substantially free of, e.g., there are no detectable levels of a contaminant, e.g., selected from the group consisting of endotoxin, mycoplasma, replication competent lentivirus (RCL), p24, VSV-G nucleic acid, HIV gag, residual anti-CD3/anti-CD28 coated beads, mouse antibodies, pooled human serum, bovine serum albumin, bovine serum, culture media components, vector packaging cell or plasmid components, a bacterium and a fungus. In one embodiment, the bacterium is at least one selected from the group consisting of Alcaligenes faecalis, Candida albicans, Escherichia coli, Haemophilus influenza, Neisseria meningitides, Pseudomonas aeruginosa, Staphylococcus aureus, Streptococcus pneumonia, and Streptococcus pyogenes group A.

[0920] When “an immunologically effective amount,” “an anti-tumor effective amount,” “a tumor-inhibiting effective amount,” or “therapeutic amount” is indicated, the precise amount of the compositions of the present invention to be administered can be determined by a physician with consideration of individual differences in age, weight, tumor size, extent of infection or metastasis, and condition of the patient (subject). It can generally be stated that a pharmaceutical composition comprising the T cells described herein may be administered at a dosage of 10⁴ to 10⁹ cells/kg body weight, in some instances 10⁵ to 10⁶ cells/kg body weight, including all integer values within those ranges. T cell compositions may also be administered multiple times at these dosages. The cells can be administered by using infusion techniques that are commonly known in immunotherapy (see, e.g., Rosenberg et al., New Eng. J. of Med. 319:1676, 1988).

[0921] In certain aspects, it may be desired to administer activated T cells to a subject and then subsequently redraw blood (or have an apheresis performed), activate T cells therefrom according to the present invention, and reinfuse the patient with these activated and expanded T cells. This process can be carried out multiple times every few weeks. In certain aspects, T cells can be activated from blood draws of from 10 cc to 400 cc. In certain aspects, T cells are activated from blood draws of 20 cc, 30 cc, 40 cc, 50 cc, 60 cc, 70 cc, 80 cc, 90 cc, or 100 cc.

[0922] The administration of the subject compositions may be carried out in any convenient manner, including by aerosol inhalation, injection, ingestion, transfusion, implantation or transplantation. The compositions described herein may be administered to a patient trans arterially, subcutaneously, intradermally, intratumorally, intranodally, intramedullary, intramuscularly, by intravenous (i.v.) injection, or intraperitoneally. In one aspect, the T cell compositions of the present invention are administered to a patient by intradermal or subcutaneous injection. In one aspect, the CAR-expressing cell (e.g., T cell or NK cell) compositions of the present invention are administered by i.v. injection. The compositions of CAR-expressing cells (e.g., T cells or NK cells) may be injected directly into a tumor, lymph node, or site of infection.

[0923] In a particular exemplary aspect, subjects may undergo leukapheresis, wherein leukocytes are collected, enriched, or depleted ex vivo to select and/or isolate the cells of interest, e.g., immune effector cells (e.g., T cells or NK cells). These immune effector cell (e.g., T cell or NK cell) isolates may be expanded by methods known in the art and treated such that one or more CAR constructs of the invention may be introduced, thereby creating a CAR-expressing cell (e.g., CAR T cell or CAR-expressing NK cell) of the invention. Subjects in need thereof may subsequently undergo standard treatment with high dose chemotherapy followed by peripheral blood stem cell transplantation. In certain aspects, following or concurrent with the transplant, subjects receive an infusion of the expanded CAR-expressing cells (e.g., CAR T cells or NK cells) of the present invention. In an additional aspect, expanded cells are administered before or following surgery.

[0924] In embodiments, lymphodepletion is performed on a subject, e.g., prior to administering one or more cells that express a CAR described herein, e.g., a BCMA-binding CAR described herein. In embodiments, the lymphodepletion comprises administering one or more of melphalan, cytoxan, cyclophosphamide, and fludarabine.

[0925] The dosage of the above treatments to be administered to a patient will vary with the precise nature of the condition being treated and the recipient of the treatment. The scaling of dosages for human administration can be performed according to art-accepted practices. The dose for CAMPATH, for example, will generally be in the range 1 to about 100 mg for an adult patient, usually administered daily for a period between 1 and 30 days. The preferred daily dose is 1 to 10 mg per day although in some instances larger doses of up to 40 mg per day may be used (described in U.S. Pat. No. 6,120,766).

[0926] In one embodiment, the CAR is introduced into immune effector cells (e.g., T cells or NK cells), e.g., using in vitro transcription, and the subject (e.g., human) receives an initial administration of CAR immune effector cells (e.g., T cells or NK cells) of the invention, and one or more subsequent administrations of the CAR immune effector cells (e.g., T cells or NK cells) of the invention, wherein the one or more subsequent administrations are administered less than 15 days, e.g., 14, 13, 12, 11, 10, 9, 8, 7, 6, 5, 4, 3, or 2 days after the previous administration. In one embodiment, more than one administration of the CAR immune effector cells (e.g., T cells or NK cells) of the invention are administered to the subject (e.g., human) per week, e.g., 2, 3, or 4 administrations of the CAR immune effector cells (e.g., T cells or NK cells) of the invention are administered per week. In one embodiment, the subject (e.g., human subject) receives more than one administration of the CAR immune effector cells (e.g., T cells or NK cells) per week (e.g., 2, 3 or 4 administrations per week) (also referred to herein as a cycle), followed by a week of no CAR immune effector cells (e.g., T cells or NK cells) administrations, and then one or more additional administration of the CAR immune effector cells (e.g., T cells or NK cells) (e.g., more than one administration of the CAR immune effector cells (e.g., T cells or NK cells) per week) is administered to the subject. In another embodiment, the subject (e.g., human subject) receives more than one cycle of CAR immune effector cells (e.g., T cells or NK cells), and the time between each cycle is less than 10, 9, 8, 7, 6, 5, 4, or 3 days. In one embodiment, the CAR immune effector cells (e.g., T cells or NK cells) are administered every other day for 3 administrations per week. In one embodiment, the CAR immune effector cells (e.g., T cells or NK cells) of the invention are administered for at least two, three, four, five, six, seven, eight or more weeks.

[0927] In one aspect, BCMA CAR-expressing cells (e.g., BCMA CARTs or BCMA CAR-expressing NK cells) are generated using lentiviral viral vectors, such as lentivirus. CAR-expressing cells (e.g., CARTs or CAR-expressing NK cells) generated that way will have stable CAR expression.

[0928] In one aspect, CAR-expressing cells, e.g., CARTs, are generated using a viral vector such as a gammaretroviral vector, e.g., a gammaretroviral vector described herein. CARTs generated using these vectors can have stable CAR expression.

[0929] In one aspect, CAR-expressing cells (e.g., CARTs or CAR-expressing NK cells) transiently express CAR vectors for 4, 5, 6, 7, 8, 9, 10, 11, 12, 13, 14, 15 days after transduction. Transient expression of CARs can be effected by RNA CAR vector delivery. In one aspect, the CAR RNA is transduced into the cell, e.g., T cell or NK cell, by electroporation.

[0930] A potential issue that can arise in patients being treated using transiently expressing CAR-expressing cells (e.g., CARTs or CAR-expressing NK cells) (particularly with murine scFv bearing CAR-expressing cells (e.g., CARTs or CAR-expressing NK cells)) is anaphylaxis after multiple treatments.

[0931] Without being bound by this theory, it is believed that such an anaphylactic response might be caused by a patient developing humoral anti-CAR response, i.e., anti-CAR antibodies having an anti-IgE isotype. It is thought that a patient's antibody producing cells undergo a class switch from IgG isotype (that does not cause anaphylaxis) to IgE isotype when there is a ten to fourteen day break in exposure to antigen.

[0932] If a patient is at high risk of generating an anti-CAR antibody response during the course of transient CAR therapy (such as those generated by RNA transductions), CAR-expressing cell (e.g., CART or CAR-expressing NK cell) infusion breaks should not last more than ten to fourteen days.

### EXAMPLES

[0933] The invention is further described in detail by reference to the following experimental examples. These examples are provided for purposes of illustration only, and are not intended to be limiting unless otherwise specified. Thus, the invention should in no way be construed as being limited to the following examples, but rather, should be construed to encompass any and all variations which become evident as a result of the teaching provided herein.

Without further description, it is believed that one of ordinary skill in the art can, using the preceding description and the following illustrative examples, make and utilize the compounds of the present invention and practice the claimed methods. The following working examples specifically point out various aspects of the present invention, and are not to be construed as limiting in any way the remainder of the disclosure.

### Example 1

### BCMA is Expressed in Myeloma Cell Lines and Primary Samples

### Analysis of BCMA Expression in Myeloma Cell Lines by Quantitative PCR

[0934] 16 cell lines of human cancers were screened for BCMA RNA expression by quantitative RT-PCR. RNA was extracted with RNAqueos-4PCR Kit (Ambion, AM-1914) and cDNA was synthesized with iScript Reverse Transcription Supermix for RT-qPCR (BioRad, 170-8841). The relative BCMA cDNA copies were quantified by relative qPCR (qPCR) with ABI TaqMan BCMA-specific primers and probe set (ABI, Hs03045080, lot:1139777); TaqMan GUSB (ABI, Hs99999908_M1, lot: 1093869) primers and probe set for normalization.

[0935] Analysis of the qPCR showed that all MM cell lines (U266, NCI H929 and RPMI 8226) tested express BCMA. BCMA was also detected in BJAB and LCL cells (B-cell lymphoblastoid cell lines) and CEM cells (a T-lymphoblastoid cell line). None of the other non-MM cell lines exhibited detectable expression of BCMA. This RNA analysis compliments protein detection by flow cytometry for the selection of positive BCMA expressing cell lines used in evaluations. Detailed results are provided in FIG. 1A.

Comparison by RNA analysis of BCMA expression in plasma cells and in the different multiple myeloma samples from patients is provided in FIG. 1B.

### Analysis of BCMA Expression in Multiple Myeloma Cells Lines and Primary Samples by Flow Cytometry

[0936] Multiple Myeloma (MM) cell lines U266, NCI H929 or RPMI 8226 or primary samples from MM patients (PB or BM) were stained with Human BCMA/TNFRSF17 Phycoerythrin Affinity Purified PAb, Goat IgG (R&D, FAB193P). Primary samples from multiple myeloma patients were also stained with Live/dead dye (LifeTechnologies, L34960), CD45-BV421 (Biolegend, 304032), CD38-APCeF780 (eBioscience 47-0389-42), CD138-APC (eBioscience 17-1389-42), CD19-PECY7 (eBioscience, E10328-1632), lambda chain-PerCP-eF710 (eBioscience 46-9990-42) and Kappa light chain (eBioscience, 11-9970-42). Data from stained samples were collected using a BD Fortessa cytometer. Flow cytometric analysis performed using Flowjo v10 (Tree Star Inc).

[0937] BCMA was detected on the surface of all the 3 MM cell lines as shown in FIGS. 2A, 2B, and 2C. Moreover, BCMA was homogenously expressed on majority of clonal (kappa or lambda restricted) plasma cells in most of the MM patients analyzed (9 of 10). (FIGS. 2D and 2E). These results provide strong support for the relevance of BCMA as a target in MM.

### Flow Cytometric Analysis of BCMA Expression in Normal Peripheral Blood Cells, CD3/CD28 Expanded T Cells and Bone Marrow Stem Cells

[0938] In order to rule out possible off-target expression of BCMA in normal tissues and on T cells, BCMA expression in two bone marrow (BM) and peripheral blood (PB) specimens from voluntary healthy donors, were evaluated by flow cytometry. Mononuclear cells were obtained through Ficoll-Paque (GE healthcare) gradient separation. BM cells were marked with Live/dead dye (LifeTechnologies, L34960) then stained with monoclonal antibodies against, CD34-APC (eBioscience, 17-0349-42, CD38-PECY7(eBioscience, 25-0389-42), human hemopoietic lineage markers mix-FITC (eBioscience, 22-7778-72), CD45RA-APC-eF780 (eBioscience, 47-0458-42, CD90-PerCPCy5.5 (eBioscience, 45-0909-41, CD10-BV421 (Biolegend, 312218) and BCMA-PE (R&D, FAB193P). Fresh PB cells were stained at baseline and following stimulation and expansion with CD3/CD28 beads. PB was stained with monoclonal antibodies against CD14-V500 (BD, 561391), CD45-BV421 (Biolegend, 304032), CD3-AF700 (56-0038-42), CD19-PECY7 (eBioscience, E10328-1632, and BCMA-PE (R&D, FAB193P). Cells were washed twice and staining data acquired in a BD Fortessa cytometer. Flow cytometric analysis was carried out by using FlowJo v10 (Tree Star Inc).

[0939] No evidence of BCMA expression was observed on PBMC. Importantly, T cells remained negative for BCMA during expansion. (FIG. 3A) Analysis of different stem cells subsets in the BM revealed no expression of BCMA on immature, lineage negative CD34 positive stem cells. In particular, the Common Lymphocyte Progenitor and the Hemopoietic Stem Cells were negative. (FIG. 3B)

### Analysis of BCMA Expression in Normal Tissues by Immunohistochemistry

[0940] Three commercially available antibodies (Novus, Sigma) for immunohistochemistry were selected and titrated in paraffin-fixed normal splenic tissue. Tissue micro arrays (TMA) including 27 healthy human tissues were stained by immunohistochemistry.

All 3 antibodies showed positive staining on normal plasma cells in lymph nodes, spleen and tonsil, whereas normal lung, pancreas and thyroid tested negative. Staining, likely non-specific due to the polyclonal nature of the available antibodies, was observed in the following organs: stomach, salivary gland, kidney, adrenal gland, cerebellum, heart and appendix. Selected results are shown in FIGS. 4A-4E and summarized in Table 11.

TABLE 11
BCMA expression by immunohistochemistry
staining in normal tissues

| Site | n = | Staining |
|---|---|---|
| Placenta | 2 | neg |
| Adipose | 2 | neg |
| Urinary bladder | 2 | neg |
| Cerebral cortex | 2 | neg |
| Cerebellum | 2 | pos |
| breast | 0 | N/A |
| cervix | 1 | neg |
| colon | 2 | pos |
| diaphragm | 2 | neg |
| Duodenum | 2 | pos |
| Esophagus | 2 | pos |
| Gallbladder | 2 | neg |
| Heart | 2 | neg |
| Ileum | 2 | pos |
| Jejunum | 2 | pos |
| Kidney | 2 | neg |
| Liver | 2 | neg |
| Lung | 2 | neg |
| Ovary | 2 | neg |
| pancreas | 2 | neg |
| Thyroid | 1 | neg |
| Rectum | 2 | pos |
| Skin | 2 | neg |
| Skeletal muscle | 2 | neg |
| Spleen | 2 | pos |
| Stomach | 2 | pos |
| Testes | 2 | neg |
| Thymus | 2 | neg |
| Smooth muscle | 2 | neg |
| Tonsil | 1 | pos |
| Uterus | 2 | neg |

These results led to further analysis of expression, in particular using RNAscope in situ hybridization to confirm the lack of BCMA expression in these tissues. Selected results are shown in FIG. 4F.

### Example 2

### In Vitro Evaluation of CARs Containing Humanized Anti-BCMA scFv

### BCMA CAR Constructs Generated from Humanized Mouse Anti-BCMA Antibody

[0941] Four distinct anti-BCMA CARs constructs were designed using the VL and VH sequences disclosed in PCT Publication WO 2012/163805 (the contents of which are hereby incorporated by reference in its entirety). In order to create the anti-BCMA CARs, the VH and VL sequences were synthesized and joined with a [Gly-Gly-Gly-Gly-Ser]×4 linker (SEQ ID NO: 27) creating two single-chain variable fragments (scFvs) in which the VH precedes the VL (H2L, SEQ ID NO: 255) or the VL precedes the VH (L2H, SEQ ID NO: 257). The CD8 leader was also synthesized and fused to the 5′ end of each scFv with a BamHI site Restriction sites for XbaI and BspE1 were included at the 5′ and 3′ ends, respectively, at the time of synthesis to facilitate cloning of the CD8 leader-scFvs into the pTRPE lentiviral vector containing the hinge and CD8TM regions with 4-1BB and CD3z cytoplasmic domains. Two separate CAR backbone constructs were used for the cloning, one containing a human CD8 hinge and the other containing a human IgG4 hinge to generate the 4 anti-BCMA CAR constructs shown schematically in FIG. 5, designated pBCMA 1, pBCMA 2, pBCMA 3, and pBCMA 4. To produce infectious lentiviral vector supernatants, 293-T cells were transfected with the following plasmids: pTRP-VSV-G (encoding the vesicular stomatitis virus (VSV-G) envelope), pTRP gag/pol (encoding gag and pol) and pTRP-Rev with either of the four BCMA CAR constructs utilizing lipofectamine 2000 (Invitrogen).

[0942] The nucleic acid sequence of humanized anti-BCMA scFv in which VH precedes the VL (H2L, e.g., pBCMA 2 and pBCMA 4) is as follows:

(SEQ ID NO: 272)
CAGGTGCAGCTGGTCCAGAGCGGCGCCGAAGTGAAGAAGCCCGGCAGCTC
CGTGAAAGTGAGCTGCAAGGCCAGCGGCGGCACCTTCAGCAACTACTGGA
TGCACTGGGTGAGGCAGGCCCCCGGACAGGGCCTGGAGTGGATGGGCGCC
ACCTACAGGGGCCACAGCGACACCTACTACAACCAGAAGTTCAAGGGCCG
GGTGACCATCACCGCCGACAAGAGCACCAGCACCGCCTACATGGAACTGA
GCAGCCTCAGGAGCGAGGACACCGCTGTGTATTACTGCGCCAGGGGCGCC
ATCTACAACGGCTACGACGTGCTGGACAACTGGGGCCAGGGCACACTAGT
GACCGTGTCCAGCGGTGGAGGAGGTAGCGGAGGAGGCGGGAGCGGTGGAG
GTGGCTCTGGAGGTGGCGGAAGCGACATCCAGATGACCCAGAGCCCTAGC
TCACTGAGCGCCAGCGTGGGCGACAGGGTGACCATTACCTGCTCCGCCAG
CCAGGACATCAGCAACTACCTGAACTGGTACCAGCAGAAGCCCGGCAAGG
CCCCCAAGCTGCTGATCTACTACACCTCCAACCTGCACTCCGGCGTGCCC
AGCAGGTTCAGCGGAAGCGGCAGCGGCACCGATTTCACCCTGACCATCTC
CAGCCTGCAGCCCGAGGACTTCGCCACCTACTACTGCCAGCAGTACAGGA
AGCTCCCCTGGACTTTCGGCCAGGGCACCAAACTGGAGATCAAGCGT

[0943] The corresponding amino acid sequence for the humanized anti-BCMA scFv in which Vh precedes the VL (H2L, e.g., pBCMA 2 and pBCMA 4) is as follows:

(SEQ ID NO: 271)
Q V Q L V Q S G A E V K K P G S S V K V S C K A S
G G T F S N Y W M H W V R Q A P G Q G L E W M G A
T Y R G H S D T Y Y N Q K F K G R V T I T A D K S
T S T A Y M E L S S L R S E D T A V Y Y C A R G A
I Y N G Y D V L D N W G Q G T L V T V S S G G G G
S G G G G S G G G G S G G G G S D I Q M T Q S P S
S L S A S V G D R V T I T C S A S Q D I S N Y L N
W Y Q Q K P G K A P K L L I Y Y T S N L H S G V P
S R F S G S G S G T D F T L T I S S L Q P E D F A
T Y Y C Q Q Y R K L P W T F G Q G T K L E I K R

[0944] The nucleic acid sequence of humanized anti-BCMA scFv in which VL precedes the VH (L2H, e.g., pBCMA1 and pBCMA3) is as follows:

(SEQ ID NO: 274)
GACATCCAGATGACCCAGAGCCCTAGCTCACTGAGCGCCAGCGTGGGCGA
CAGGGTGACCATTACCTGCTCCGCCAGCCAGGACATCAGCAACTACCTGA
ACTGGTACCAGCAGAAGCCCGGCAAGGCCCCCAAGCTGCTGATCTACTAC
ACCTCCAACCTGCACTCCGGCGTGCCCAGCAGGTTCAGCGGAAGCGGCAG
CGGCACCGATTTCACCCTGACCATCTCCAGCCTGCAGCCCGAGGACTTCG
CCACCTACTACTGCCAGCAGTACAGGAAGCTCCCCTGGACTTTCGGCCAG
GGCACCAAACTGGAGATCAAGCGTGGTGGAGGAGGTAGCGGAGGAGGCGG
GAGCGGTGGAGGTGGCTCTGGAGGTGGCGGAAGCCAGGTGCAGCTGGTCC
AGAGCGGCGCCGAAGTGAAGAAGCCCGGCAGCTCCGTGAAAGTGAGCTGC
AAGGCCAGCGGCGGCACCTTCAGCAACTACTGGATGCACTGGGTGAGGCA
GGCCCCCGGACAGGGCCTGGAGTGGATGGGCGCCACCTACAGGGGCCACA
GCGACACCTACTACAACCAGAAGTTCAAGGGCCGGGTGACCATCACCGCC
GACAAGAGCACCAGCACCGCCTACATGGAACTGAGCAGCCTCAGGAGCGA
GGACACCGCTGTGTATTACTGCGCCAGGGGCGCCATCTACAACGGCTACG
ACGTGCTGGACAACTGGGGCCAGGGCACACTAGTGACCGTGTCCAGC

The corresponding amino acid sequence of humanized anti-BCMA scFv in which VL precedes the VH (L2H, e.g., pBCMA1 and pBCMA3) is as follows:

(SEQ ID NO: 273)
DIQMTQSPSS LSASVGDRVT ITCSASQDIS NYLNWYQQKP
GKAPKLLIYY TSNLHSGVPS RFSGSGSGTD FTLTISSLQP
EDFATYYCQQ YRKLPWTFGQ GTKLEIKRGG GGSGGGGSGG
GGSGGGGSQV QLVQSGAEVK KPGSSVKVSC KASGGTFSNY
WMHWVRQAPG QGLEWMGATY RGHSDTYYNQ KFKGRVTITA
DKSTSTAYME LSSLRSEDTA VYYCARGAIY NGYDVLDNWG
QGTLVTVSS

[0945] These pBCMA-CARs containing humanized anti-BCMA scFvs are utilized in the experiments detailed below and in Example 3.

### Efficient Expression of BCMA-CARs on T Cells

[0946] Fresh isolated human T cells from healthy donors were transduced with lentiviral vector supernatants encoding the pBCMA 1 to 4 CARs, and anti-BCMA CAR expression was evaluated by flow cytometry. Briefly, T cells were cultured in RPMI 1640 medium with 10% FBS and stimulated with anti-CD3/anti-CD28 Dynabeads (Invitrogen). 24 hrs after stimulation, T cells were transduced with the four different pBCMA CAR lentiviral vector supernatants. T cells transduced with an anti-mesothelin CAR (SS1) vector were used as a positive control. Mock-transduced T cells (NTD) were used as a negative control. 4-6 days after lentiviral transduction T cells were stained with biotinylated Protein L antibody followed by strepavidin FITC (BD Biosciences) or Biotin Goat-anti mouse and CAR expression was evaluated by flow cytometry (FACS Calibur, BD). Flow cytometric analysis was carried out by using Flowjo (Tree Star Inc).

[0947] After transduction it was observed that pBCMA CARs were efficiently expressed on the cell surface of the transduced T cells as shown in FIG. 6.

Cytokine Production from Anti-BCMA CAR-Expressing T Cells (BCMA CARTs)

[0948] K562 cells ectopically expressing human BCMA (K562-BCMA) were generated by lentiviral transduction using a vector supplied by GeneCopoeia followed by puromycin selection. K562-BCMA specific target cells were utilized in vitro to evaluate cytotoxic and cytokine production from pBCMA 1-4 CAR-transduced T cells. Anti-pBCMA CAR T cells or control T cells were expanded until the end of log-phase growth and subsequently co-cultured for 16 hrs with either K562-BCMA specific target cells, K562-Mesothelin target cells as positive control or no target cells as negative control at a 3 to 1 ratio of effector cells to target cells. Culture supernatants were harvested and IFN-gamma and IL-2 concentration was measured by specific ELISA following manufacturer instructions (R&D).

T cells expressing all four anti-pBCMA CARs produced similar levels of IFN-gamma and IL-2 when co-cultured with BCMA-expressing target cells but not with BCMA-negative target cells as shown in FIGS. 7A and 7B.

### Cytotoxic Activity of BCMA CARTs on Myeloma Cell Lines

[0949] The ability of pBCMA CAR T cells to kill BCMA-expressing target cells was evaluated using a ⁵¹Cr release-assay. Briefly, target MM cells were labeled with ⁵¹Cr (Sodium Dichromate salt), washed and co-cultured with effector pBCMA CAR T cells at different effector/target ratios. Supernatants were collected at 4-hrs, and placed into 96 well Lumaplates (Perkin Elmer). The amount of ⁵¹Cr released from the labeled target cells was measured on a liquid scintillation counter (MicroBeta trilux, Perkin Elmer). Target cells incubated in medium alone or with 1% SDS were used to determine spontaneous (S) or maximum (M)⁵¹Cr release. Percentage of specific lysis was calculated as follow: 100×(cpm experimental release−cpm S release)/(cpm M release−cpm S release).

[0950] All four pBCMA-CAR-transduced T cells were able to induce lysis of K562-BCMA cells and BCMA-expressing multiple myeloma cells lines with little activity towards the BCMA negative cell lines as shown in FIGS. 8A, 8B, 8C, and 8D. pBCMA-CARs with a CD8 hinge (pBCMA 3 and 4) exhibited greater cytotoxicity compared with pBCMA CARs containing the IgG4 hinge, suggesting that the hinge is an important factor in the CAR design for optimal function.

### Example 3

### In Vivo Evaluation of pBCMA-CARTs for Multiple Myeloma

[0951] Based upon in vitro data supporting enhanced function of pBCMA 3 and pBCMA 4 CAR-modified T cells, the anti-tumor activity of these CARTs was evaluated in a preclinical animal model of multiple myeloma using the RPMI 8226 cell line. RPMI 8226 cells were engineered to express Click-beetle Green luciferase (CB-G Luc⁺) to track tumor progression by bioluminescent in vivo imaging (IVIS) and Living Image software (Perkin Elmer). 4 weeks after injection of CB-G Luc⁺ RPMI 8226 cells were IV injected in NSG recipients, T cells expressing pBCMA 3 CAR, pBCMA 4 CAR, CD19 CAR (FMC63 anti-CD19 scFv with human CD8 hinge, 4-1BB and CD3z cytoplasmic domain) or SS1 CAR (SS1 anti-mesothelin scFv with human CD8 hinge, 4-1BB and CD3z cytoplasmic domain) were IV injected and the tumor burden was evaluated by optical imaging as well as by the appearance of clinical signs of disease (Table 12 below). Scoring was performed as follows: 1—no clinical signs; 2—minor gait change/minor tumor mass; 3—decreased mobility/tumor mass/still ambulatory; 4—hind limb paralysis/big tumor mass/END POINT; and 5—complete limb paralysis.

TABLE 12
Treatment Groups and Clinical Scoring.

| Groups | Scoring Day 50 |
|---|---|
| BCMA3 | 2 |
| BCMA4 | 2 |
| SS1 | 3 |
| CD19 | 4 |
| CTL | 4 |

T cells expressing either the pBCMA-3 and pBCMA 4 CAR T cells induce a significant reduction in the tumor burden of mice bearing RPMI 8226 as well as improved clinical disease activity compared with control T cells targeting mesothelin (designated SS1) or CD19 as shown in FIGS. 9A and 9B.

[0952] The experiments described in Examples 2 and 3 provided the rationale to identify human scFv binding domains for additional CAR constructs, which are described and assessed in Examples 4-7.

### Example 4

### Generating Human Anti-BCMA CAR Constructs

[0953] Human BCMA-specific scFvs for CAR constructs were identified by 3 rounds of bead-based Bio-BCMA panning. In Arm 1, SBAL-1Sk Phage Library (8.4E13) was used. In Arm 2, SBAL-3Sk(G1+G2+G4+G5) Phage Library (1E13) was used. The phage lysates were screened for BCMA reactivity by ELISA. 319 positive hits were identified, representing 135 unique sequences. The phage sequences were converted to soluble scFv that can be expressed in E. coli. The E. coli lysates were next screened by ELISA, and the periplasm was screened by FACs. 15 hits were identified by the FACs analysis. Next, the scFvs were purified from the E. coli and the purified scFvs were tested by FACs. 15 scFvs were confirmed, and were designated BCMA-1, BCMA-2, BCMA-3, BCMA-4, BCMA-5, BCMA-6, BCMA-7, BCMA-8, BCMA-9, BCMA-10, BCMA-11, BCMA-12, BCMA-13, BCMA-14, and BCMA-15. The sequences of human anti-BCMA scFv fragments (SEQ ID NOS: 39-52), are provided in Table 1 (and the name designations are provided in Table 2). Full BCMA CAR constructs (SEQ ID NOs: 99-113) were generated using the human scFv fragments (SEQ ID NOs: 39-52) in combination with the additional sequences shown in the Detailed Description, e.g., leader, CD8 hinge, CD8 transmembrane, 4-1BB intracellular domain, CD27 intracellular domain, CD28 intracellular domain, ICOS domain, CD3zeta domain (mutant), human CD3zeta domain, IgG4 hinge, Gly/Ser sequences, and/or Poly(A) sequences.

[0954] The CAR scFv fragments were then cloned into lentiviral vectors to create a full length CAR construct in a single coding frame, and using the EF1 alpha promoter for expression (SEQ ID NO: 11).

[0955] The amino acid and nucleic acid sequences of the BCMA scFv domains and BCMA CAR molecules are provided in Table 1 in the Detailed Description. Table 2 in the Detailed Description designates the nicknames for the BCMA CAR constructs with respect to the DNA ID number, also listed in Table 1.

[0956] Additional tool BCMA CAR constructs were also generated using the VH and VL sequences from PCT Publication WO2012/0163805 (the contents of which are hereby incorporated by reference in its entirety), and are based upon the results from the pBCMA3 and pBCMA4 CARs described in Examples 2 and 3. A schematic of the tool BCMA constructs (BCMA-3NP and BCMA-4NP) is shown in FIG. 10A. The two constructs differ in the orientation of the VH and VL chains (FIG. 10B). The tool BCMA CAR constructs and their corresponding DNA ID are shown below.

TABLE 3
Tool CAR construct IDs

| | | |
|---|---|---|
| Nickname | Novartis ID | DNA2.0 ID |

| | |
|---|---|
| BCMA-3NP | 126022 |
| BCMA-4NP | 126021 |

Additional BCMA CAR constructs can also be generated using the VH and VL sequences found in Table 16 in the Detailed Description. The amino acid sequences of exemplary scFv domains comprising the VH and VL domains and a linker sequence, and full-length CARs are also found in Table 16.

### Production and Calculation of Viral Titer for BCMA CAR Constructs

[0957] Lentiviral supernatants were generated from 15 BCMA-specific CAR constructs obtained from scFv phage screening (Table 2). Lentiviral supernatants for 2 BCMA tool CAR constructs, BCMA-3NP and BCMA-4NP, were also generated. The tool constructs described in this example are based on the pBCMA3 and pBCMA4 constructs previously described in Examples 2 and 3.

[0958] To generate lentiviral supernatants, LentiX-293T cells were seeded on Day 0 and transfected on Day 1 with Lipofectamine 2000 transfection reagent (Life Technologies). For each construct, the plasmid DNA used was: pRSV.REV (Rev expression plasmid), pMDLg/p.RRE (Gag/Pol expression plasmid), pVSV-G (VSV glycoprotein expression plasmid), and CAR transfer vector. The transfection mixture was replaced with fresh medium on Day 2, and viral supernatant were collected on Days 3 and 4.

[0959] Viral supernatants were concentrated using Lenti-X Concentrator reagent (Clontech), and the resulting pellets were resuspended in growth medium at 1/10 to 1/100 of the original volume. Concentrated viral supernatants were aliquoted and stored at −80° C. Calculation of viral titer was determined by transducing SupT1 cells and assessing CAR expression. SupT1 cells were transduced on Day 1 with a 3-fold serial dilution series of viral supernatants with a starting concentration of 1:300. CAR expression was assessed on Day 5 with BCMA-Fc antigen (R&D Systems) and Biotin-Protein L reagent (GenScript). Viral titer was calculated according to the following formula:

(% CAR+)×(#SupT1 cells)/(Amount of Virus (ml))×(Dilution)

[0960] Average viral titer was calculated from dilution points in the linear range between 1 and 20% CAR-positive. Titer calculations for BCMA CAR clones are shown in Table 4.

TABLE 4
Titer of lentiviral supernatants from LentiX-
293T cells transduced with BCMA-targeting CARs
as measured by either BCMA-Fc or Protein L.

| | BCMA-Fc titer | Protein L titer |
|---|---|---|
| Clone | (TU/ml) | (TU/ml) |
| BCMA-1 | 1.27E+08 | 7.54E+06 |
| BCMA-2 | 1.02E+08 | 1.43E+08 |
| BCMA-4 | 1.46E+08 | 1.58E+08 |
| BCMA-5 | 9.98E+07 | 9.64E+07 |
| BCMA-6 | 1.41E+08 | 4.82E+06 |
| BCMA-7 | 6.41E+07 | 5.53E+07 |
| BCMA-8 | 6.15E+07 | 6.98E+07 |
| BCMA-9 | 8.57E+07 | 7.75E+07 |
| BCMA-10 | 6.73E+07 | 8.77E+07 |
| BCMA-11 | 4.60E+07 | 5.43E+06 |
| BCMA-12 | 4.88E+07 | 5.97E+07 |
| BCMA-13 | 9.96E+07 | 5.52E+07 |
| BCMA-14 | 9.88E+07 | 1.20E+08 |
| BCMA-15 | 7.39E+07 | 7.41E+07 |
| BCMA-3NP | 5.38E+07 | 6.11E+07 |
| BCMA-4NP | 5.35E+07 | 5.37E+07 |

[0961] All BCMA CAR clones were detected with BCMA-Fc antigen, but detection was weaker with Biotin-Protein L for a number of clones (BCMA-1, BCMA-6, BCMA-11). Titers based on BCMA-Fc detection were used to calculate MOI for transduction in primary T cells. The BCMA CAR constructs containing human anti-BCMA scFvs described in this example are used throughout the experiments in Examples 4 and 5. The tool BCMA CAR constructs described in this example are also used in the experiments described in Examples 5, 6, and 7.

### Example 5

### In Vitro Characterization of Tool BCMA CAR Constructs

### JNL Reporter Assay for Tool BCMA CAR Constructs

[0962] Jurkat-NFAT-luciferase (JNL) cells transduced with the tool BCMA CAR constructs were evaluated for activation in response to BCMA-expressing target cell lines. On Day 0, JNL cells were transduced with BCMA-3NP and BCMA-4NP. Virus concentrations were adjusted to a MOI of 3 and incubated overnight. On Day 6 following transduction, BCMA CAR-transduced JNL cells were incubated with target cells at effector-to-target (E:T) ratios ranging from 0 to 27. Target cell lines were: K562 (BCMA negative control), and BCMA positive multiple myeloma cell lines, NCI-H929, KMS26, and RPMI 8226. JNL activation was measured using Bright-Glo substrate (Promega) on Day 7. CAR expression on transduced JNL was assessed on Day 6 with BCMA-Fc antigen (Table 5). This reporter assay demonstrates that the tool BCMA-targeting CAR clones are activated in a target-specific manner (FIG. 11).

TABLE 5
Percent CAR expression on JNL cells

| | BCMA-Fc detection |
|---|---|
| Clone | % CAR+ |
| BCMA-3NP | 31.2 |
| BCMA-4NP | 41.9 |

[0963] Schedule for isolation, transduction and activation of primary T cells with BCMA-targeting tool CARs is shown in Table 6. On Day 0, healthy human donor PBMCs (Novartis Employee Blood Donor program) were isolated from whole blood by Ficoll extraction, and T cells were isolated from PBMC by negative selection using the Pan T Cell Isolation Kit II (Miltenyi Biotec). Isolated T cells were stimulated overnight with Dynabeads Human T-Expander CD3/CD28 beads (Life Technologies) at a 3:1 ratio of beads-to-cells. T cells were also stained to assess relative amounts of CD4+ and CD8+ cells (FIG. 12).

TABLE 6
Schedule for T cell expansion of BCMA CAR transduced clones

| Day # | Activity |
|---|---|
| 0 | Isolate and activate T cells |
| 1 | Transduce T cells (MOI = 5) |
| 2 | Add medium - 0.5 ml/well |
| 3 | |
| 4 | Split 1:2 |
| 5 | |
| 6 | Split 1:2 (Split UTD control 1:2.5) |
| 7 | |
| 8 | |
| 9 | Split 1:2 |
| 10 | |
| 11 | De-bead and freeze aliquots |

[0964] On Day 1, T cells were transduced with BCMA-3NP and BCMA-4NP. Virus concentrations were adjusted to a MOI of 5 and incubated overnight. On Day 11, transduced CART cells were de-beaded and frozen in aliquots in 90% FBS, 10% DMSO. Following transduction and expansion, T cells were again stained to assess relative amounts of CD4+ and CD8+ cells. In addition, CAR expression was assessed with BCMA-Fc antigen (FIG. 13).

### BCMA Proliferation Assay

[0965] BCMA CART cell proliferation in response to BCMA-expressing target cells was evaluated. CART cells were thawed on Day 0 and incubated overnight to recover. On Day 1, CART cells were labeled with CellTrace CFSE (Life Technologies) and incubated with irradiated target cells at an E:T ratio of 1:1. Dynabeads Human T-Expander CD3/CD28 beads at a bead-to-cell ratio of 3:1 were included as a positive control. On Day 5, CFSE levels were measured in CART cells (FIG. 14). In addition, CART cells were stained with CD3, CD4, CD8, and BCMA-Fc antigen and measured by flow cytometry relative to CountBright Absolute Counting Beads (Life Technologies) to determine relative cell counts (FIG. 15). Specific proliferation in response to BCMA observed for both BCMA-3NP and BCMA-4NP.

### BCMA CART Luciferase Cell Killing Assay

[0966] BCMA CART cell killing in response to BCMA-expressing target cells was evaluated. CART cells were thawed on Day 0 and incubated overnight to recover. On Day 1, CART cells were incubated with either BCMA expressing KMS11-luciferase or MM1-S-luciferase target cells at E:T ratios ranging from 0 to 20. Loss of luciferase signal resulting from cell killing was measured using Bright-Glo substrate on Day 2 and specific lysis was calculated according to the following formula:

Specific lysis (%)=100−(sample luminescence/average maximal luminescence)*100

Results of cell killing are showing in FIG. 16 demonstrating tool CART clones have specific killing response.

### BCMA CART CFSE Cell Killing Assay

[0967] BCMA CART cell killing in response to BCMA-expressing target cells was evaluated. CART cells were thawed on Day 0 and incubated overnight to recover. On Day 1, target cells were labeled with CellTrace CFSE (Life Technologies) and incubated with BCMA CAR T cells at E:T ratios ranging from 0 to 10. Target cell lines were: K562-BCMA (engineered to stably express BCMA), K562 (parental line), and BCMA positive multiple myeloma cell lines, NCI-H929, KMS26, and RPMI 8226. Loss of CFSE-positive cells resulting from cell killing was measured on Day 2 by flow cytometry relative to CountBright Absolute Counting Beads (Life Technologies) to determine relative cell counts (FIG. 17). Specific cell killing was observed for both BCMA-3NP and BCMA-4NP.

[0968] Based on in vitro characterization of BCMA tool CAR clones, BCMA-3NP and BCMA-4NP, were selected for in vivo evaluation in KMS11-luciferase disseminated tumor model. UTD (untransduced) T cells were selected as a negative control. The results from the in vivo characterization is further described in Example 5.

### Example 6

### In Vitro Characterization of BCMA CART

[0969] The experiments described in this example utilize CAR constructs containing human anti-BCMA scFvs from Table 1, and the tool BCMA CAR contructs.

### JNL Reporter Assay for BCMA CAR Constructs

[0970] Jurkat-NFAT-luciferase (JNL) cells transduced with BCMA CAR constructs were evaluated for activation in response to BCMA-expressing target cell lines. Small-scale viral supernatant samples were generated in HEK293T cells for transduction of JNL cells. On Day 3 following transduction, BCMA CAR-transduced JNL cells were incubated with target cells at an effector-to-target (E:T) ratio of 6:1. Target cell lines were: K562-BCMA (engineered to stably express BCMA), K562 (parental line), and BCMA positive multiple myeloma cell lines, NCI-H929 and RPMI 8226. JNL activation was measured using Bright-Glo substrate (Promega) on Day 4. CAR expression on transduced JNL was assessed on Day 7 with BCMA-Fc antigen and Biotin-Protein L reagent (Table 7). This reporter assay demonstrates that several BCMA-targeting CAR clones are activated in a target-specific manner (FIG. 18).

TABLE 7
Percent CAR expression on JNL cells

| | BCMA-Fc detection |
|---|---|
| Clone | % CAR+ |
| BCMA-1 | 72.1 |
| BCMA-2 | 32.0 |
| BCMA-3 | 0.0 |
| BCMA-4 | 49.5 |
| BCMA-5 | 28.9 |
| BCMA-6 | 44.4 |
| BCMA-7 | 30.4 |
| BCMA-8 | 32.4 |
| BCMA-9 | 54.7 |
| BCMA-10 | 29.5 |
| BCMA-11 | 42.7 |
| BCMA-12 | 23.4 |
| BCMA-13 | 32.7 |
| BCMA-14 | 31.8 |
| BCMA-15 | 36.9 |
| BCMA-3NP | 6.7 |
| BCMA-4NP | 28.3 |

[0971] JNL activity was not correlated with % CAR expression. Based on BCMA-specific activation, the following BCMA CAR clones were selected for characterization in primary T cells: BCMA-1, BCMA-4, BCMA-5, BCMA-7, BCMA-8, BCMA-10, BCMA-12, BCMA-13, BCMA-14, and BCMA-15. Based on the non-specific activation observed, BCMA-6 was selected as a negative control. Based on the absence of activity observed, BCMA-9 was also selected as a negative control.

### BCMA CAR Transduction of Primary Human T Cells

[0972] Schedule for isolation, transduction and activation of primary T cells with BCMA-targeting CARs is shown in Table 8. On Day 0, healthy human donor PBMCs (Novartis Employee Blood Donor program) were isolated from whole blood by Ficoll extraction, and T cells were isolated from PBMC by negative selection using the Pan T Cell Isolation Kit II (Miltenyi Biotec). Isolated T cells were stimulated overnight with Dynabeads Human T-Expander CD3/CD28 beads (Life Technologies) at a 3:1 ratio of beads-to-cells. T cells were also stained to assess relative amounts of CD4+ and CD8+ cells (FIG. 19).

TABLE 8
Schedule for T cell expansion of BCMA CAR transduced clones

| Day # | Activity |
|---|---|
| 0 | Isolate and activate T cells |
| 1 | Transduce T cells (MOI = 5) |
| 2 | Add medium - 0.5 ml/well |
| 3 | |
| 4 | Split 1:3 |
| 5 | |
| 6 | Split 1:2 |
| 7 | |
| 8 | Split 1:2.25 |
| 9 | |
| 10 | |
| 11 | De-bead and freeze aliquots |

[0973] On Day 1, T cells were transduced with the following BCMA CAR clones: BCMA-1, BCMA-4, BCMA-5, BCMA-6, BCMA-7, BCMA-8, BCMA-9, BCMA-10, BCMA-12, BCMA-13, BCMA-14, BCMA-15, BCMA-3NP, and BCMA-4NP. Virus concentrations were adjusted to a MOI of 5 (Table 9) and incubated overnight.

TABLE 9
Calculation of T cells added per well
for each clone to obtain an MOI of 5.

| Clone | TU/ml | MOI: 5 per well |
|---|---|---|
| BCMA-1 | 1.27E+08 | 39.4 |
| BCMA-4 | 1.46E+08 | 34.3 |
| BCMA-5 | 9.98E+07 | 50.1 |
| BCMA-6 | 1.41E+08 | 35.5 |
| BCMA-7 | 6.41E+07 | 78.0 |
| BCMA-8 | 6.15E+07 | 81.4 |
| BCMA-9 | 8.57E+07 | 58.3 |
| BCMA-10 | 6.73E+07 | 74.3 |
| BCMA-12 | 4.88E+07 | 102.5 |
| BCMA-13 | 9.96E+07 | 50.2 |
| BCMA-14 | 9.88E+07 | 50.6 |
| BCMA-15 | 7.39E+07 | 67.6 |
| BCMA-3NP | 5.38E+07 | 92.9 |
| BCMA-4NP | 5.35E+07 | 93.5 |

[0974] On Day 11, transduced CART cells were de-beaded and frozen in aliquots in 90% FBS, 10% DMSO. Following transduction and expansion, T cells were again stained to assess relative amounts of CD4+ and CD8+ cells. In addition, CAR expression was assessed with BCMA-Fc antigen (FIG. 20).

### BCMA CART Proliferation Assay

[0975] BCMA CART cell proliferation in response to BCMA-expressing target cells was evaluated. CART cells were thawed on Day 0 and incubated overnight to recover. On Day 1, CART cells were labeled with CellTrace CFSE (Life Technologies) and incubated with irradiated target cells at an E:T ratio of 1:1. On Day 6, CFSE levels were measured in CART cells (FIG. 21).

[0976] In addition, CART cells were stained with CD3, CD4, and CD8 and measured by flow cytometry relative to CountBright Absolute Counting Beads (Life Technologies) to determine relative cell counts (FIGS. 22A, 22B, and 22C). Specific proliferation in response to BCMA observed for the following CART clones: BCMA-4, BCMA-10, BCMA-12, BCMA-13, BCMA-14, and BCMA-15.

### BCMA CART Killing Assay

[0977] BCMA CART cell killing in response to BCMA-expressing target cells was evaluated. CART cells were thawed on Day 0 and incubated overnight to recover. On Day 1, CART cells were incubated with BCMA expressing KMS11-luciferase target cells at E:T ratios ranging from 0 to 10. Loss of luciferase signal resulting from cell killing was measured using Bright-Glo substrate on Day 2 and specific lysis was calculated according to the following formula:

Specific lysis (%)=100−(sample luminescence/average maximal luminescence)*100

[0978] Results of the cell killing assay are shown in FIG. 23A, comparing each BCMA CAR construct to BCMA-3NP and BCMA-4NP. These results demonstrate that several CART clones (expressing the human anti-BCMA scFvs) have a greater killing response than the control BCMA-3NP and BCMA-4NP constructs. The results from select candidate BCMA CARs (BCMA-4, BCMA-9, BCMA-10, BCMA-13, and BCMA-15) are presented in graph in FIG. 23B to compare the killing capacity between the candidate CARs. Untransduced T cells and T cells transduced with BCMA-4NP construct were used as negative and positive controls, respectively. The percentage of cell killing of the select BCMA CART clones (BCMA-4, BCMA-9, BCMA-10, BCMA-13, and BCMA-15) were normalized to the percent of CAR expression for each CART and presented in FIG. 23C. The results show that BCMA-4, BCMA-9, BCMA-10, BCMA-13, and BCMA-15 CART clones all had cell killing capacity similar to that of BCMA-4NP.

[0979] A summary of the in vitro assays of BCMA CART clones described above is shown in Table 10. Based on the in vitro characterization of BCMA CART clones, BCMA-4, BCMA-10, BCMA-13, and BCMA-15 were selected for in vivo evaluation in KMS11-luciferase disseminated tumor model, as described in Example 7. BCMA-4NP was selected a positive control. BCMA-9 and UTD (untransduced) were selected as negative controls.

TABLE 10
Summary of in vitro characterization of BCMA CART clones

[chemical structure]

[chemical structure]

[chemical structure]

### Example 7

### In Vivo Characterization of BCMA CART

[0980] KMS-11 is a human multiple myeloma cell line derived from an IgGx pleural effusion, and can be grown as a xenograft in immune compromised mice. This xenograft will mimic disease in the bone marrow as seen in humans, establishing a model with which to test the efficacy of therapies on multiple myeloma in the bone. These mice can be used to test the efficacy of chimeric antigen receptor (CAR) T cells specific for cellular markers found on plasma cells and multiple myeloma cells, such as the B Cell Maturation Antigen (BCMA). KMS-11 cells were tagged with a firefly luciferase reporter gene and used in an orthotopic model of multiple myeloma in NOD.Cg-Prkdc^{scid}Il2rg^{tmIWjl}/SzJ (NSG) mice to test the efficacy of CAR T cells specific for BCMA.

[0981] BCMA expression was tested on KMS-11 cells and these cells were used in in vitro assays to look at the ability of BCMA-specific CAR T cells to recognize and respond to the target. In vivo KMS-11 cells grow when implanted intravenously via the tail vein and growth is limited primarily to the bone marrow. One week after the tumor cells are implanted, the disease shifts fully to the bones and begins to grow at an exponential rate. Left untreated, mice will start to display clinical symptoms and hind limb paralysis 5-6 weeks after tumor implantation. Tool BCMA CAR T cells were first tested in this model in an efficacy study to determine if the model is an appropriate in vivo model to test the efficacy and anti-tumor activity of BCMA CAR T cells. Following this, lead BCMA scFvs from an in vitro screen have been tested in this in vivo model and are now being confirmed in a repeat efficacy study.

### Materials and Methods:

### KMS-11 Cell Line:

[0982] The KMS-11 human multiple myeloma cell line was developed from the pleural effusion of a patient with multiple myeloma. The cells were then tagged with firefly luciferase. These suspension cells grow in RPMI supplemented with 10% heat inactivated fetal bovine serum.

### Mice:

[0983] 6 week old NSG (NOD.Cg-Prkdc^{scid}Il2rg^{tmIWjl}/SzJ) mice were received from the Jackson Laboratory (stock number 005557). Animals were allowed to acclimate to the Novartis NIBRI animal facility for at least 3 days prior to experimentation. Animals were handled in accordance with Novartis ACUC regulations and guidelines.

### Tumor Implantation:

[0984] KMS-11-luc cells were grown and expanded in vitro in RPMI supplemented with 10% heat inactivated fetal bovine serum. The cells were then transferred to a 15 ml conical tube and washed twice with cold sterile PBS. KMS-11-luc cells were then counted and resuspended at a concentration of 10×10⁶ cells per milliliter of PBS. The cells were placed on ice and immediately (within one hour) implanted in the mice. KMS-11 cells were injected intravenously via the tail vein in a 100 μl volume, for a total of 1×10⁶ cells per mouse.

### CAR T Cell Dosing:

[0985] Mice were administered 5×10⁶ T cells 7-8 days after tumor implantation. Cells were partially thawed in a 37 degree Celsius water bath and then completely thawed by the addition of 1 ml of cold sterile PBS to the tube containing the cells. The thawed cells were transferred to a 15 ml falcon tube and adjusted to a final volume of 10 mls with PBS. The cells were washed twice at 1000 rpm for 10 minutes each time and then counted on a hemocytometer. The CAR T cells were normalized for CAR transduction so that each group has the same percentage of CAR⁺ T cells. The total of the 5×10⁶ cells were then resuspended at a concentration of 50×10⁶ cells per ml of cold PBS and kept on ice until the mice were dosed. The mice were injected intravenously via the tail vein with 100 μl of the CAR T cells for a dose of 5×10⁶ T cells per mouse.

[0986] Five to seven mice per group were treated either with 100 μl of PBS alone (PBS), untransduced T cells (Mock), tool BCMA CAR T cells (BCMA-3NP or BCMA-4NP), or novel BCMA CAR T cells (BCMA-4, BCMA-9, BCMA-10, BCMA-13, BCMA-15). The T cells were all prepared from the same human donor in parallel.

### Animal Monitoring:

[0987] The health status of the mice was monitored daily, including twice weekly body weight measurements. The percent change in body weight was calculated as (BW_{current}−BWᵢₙᵢₜᵢₐₗ)/(BWᵢₙᵢₜᵢₐₗ)×100%. Tumor burden was monitored twice weekly by bioluminescent imaging. Mice were intraperitoneally injected with D-luciferin 10 minutes prior to anesthetizing and imaging the mice with a Xenogen. Disease burden was calculated by calculating the bioluminescence of the tumor cells (photons/second).

### Bioluminescence Analysis:

[0988] Percent treatment/control (T/C) values were calculated using the following formula:

% T/C=100×ΔT/ΔC if ΔT≧0;

% Regression=100×ΔT/Tᵢₙᵢₜᵢₐₗ if ΔT<0;

where T=mean bioluminescence of the drug-treated group on the final day of the study; Tᵢₙᵢₜᵢₐₗ==mean bioluminescence of the drug-treated group on initial day of dosing; ΔT==mean bioluminescence of the drug-treated group on the final day of the study—=mean bioluminescence of the drug treated group on the initial day of dosing; C==mean bioluminescence of the control group on the final day of the study; and ΔC==mean bioluminescence of the control group on the final day of the study—=mean bioluminescence of the control group on the initial day of dosing.

[0989] T/C values in the range of 100% to 42% are interpreted to have no or minimal anti-tumor activity; T/C values that are ≦42% and >10% are interpreted to have anti-tumor activity or tumor growth inhibition. T/C values ≦10% or regression values ≧−10% are interpreted to be tumor stasis. Regression values <−10% are reported as regression.

### Peripheral Blood FACS Analysis:

[0990] T cells in the peripheral blood of the mice were also monitored. Mice were bled weekly via the tail vein into EDTA coated tubes that were kept on ice. 10-20 μl of blood was plated from the tubes into 96 well plates on ice. Red blood cells were lysed with ACK red blood cell lysis buffer (Life Technologies, catalog number A10492-01) and then washed twice with cold PBS. The cells were incubated with an Fc blocking mix of human and mouse Fc block (Miltenyi Biotec, catalog numbers 130-059-901 and 130-092-575) for 30 minutes and then incubated with anti-mouse CD11b antibody (BD Biosciences, catalog number 557960), anti-human CD4 antibody (BD Biosciences catalog number 563550), anti-human CD8 antibody (BD Biosciences catalog number 560347), and BCMA-Fc antibody (R&D Systems, catalog number 193-BC-050), followed by an Ig secondary (Jackson ImmunoResearch). The cells were fixed with a 2% paraformaldehyde solution for 20 minutes, washed and stored in PBS+2% FBS overnight prior to analysis on a BD Fortessa, followed by further analysis using the FlowJo FACS analysis software. The cells were analyzed to determine the number of CAR⁺ CD4⁺ and CD8⁺ T cells per milliliter of blood in the KMS-11-luc tumor-bearing NSG mice. T cell numbers in the blood are reported as the mean±standard error of the mean (SEM).

### Results:

[0991] The anti-tumor activity of the tool BCMA CAR T cells (BCMA-3NP and BCMA 4-NP) were evaluated and directly compared in the KMS-11 model of human multiple myeloma. Following tumor implantation on day 0, mice were randomized into treatment groups and treated with 5×10⁶ T cells intravenously on day 7. Multiple myeloma disease burden and animal health were monitored until animals achieved endpoint. The mice in all the groups were euthanized on day 14 post-CAR T cell dosing (day 21 post-tumor implantation) when disease burden in the control groups nearing maximum luminescence via imaging.

[0992] A clear difference in disease burden can be seen between the control groups and the groups treated with either of the tool CAR T cells with P<0.01 on day 14 post-CAR T cell dosing. Both of the tool BCMA CAR T cells demonstrate a similar ability to control human multiple myeloma growth in NSG mice. The % T/C value for the mock transduced T cell group is 212.13%, demonstrating that the mock transduced T cells have no anti-tumor activity.

[0993] The percent delta T/C values for the BCMA-3NP and BCMA-4P groups are 1.10% and 2.17% respectively, demonstrating tumor stasis after treatment with the tool BCMA CAR T cells. The bioluminescence imaging results are shown in FIG. 24. The PBS treatment group, which did not receive any T cells, demonstrates baseline KMS-11 tumor growth kinetics in intravenously implanted NSG mice. The Mock treatment group received untransduced T cells that underwent the same in vitro expansion process as the CAR T cells. These cells serve as a T cell control to show the non-specific response of the T cells in this tumor model. Both the PBS and Mock transduced T cell treatment groups demonstrate continuous tumor progression throughout the experiment. Both the tool BCMA CAR T cells control the progression of disease after the 5×10⁶ T cell injections.

[0994] Following confirmation that the KMS-11-luc model responds to targeting via BCMA CAR T cells, a study to evaluate novel scFv leads was initiated. Following tumor implantation, mice were again randomized into treatment groups and treated with 5×10⁶ T cells intravenously on day 7. Multiple myeloma disease burden and animal health were monitored until animals achieved endpoint. The mice in each of the groups were euthanized when disease burden in the group neared maximum luminescence via imaging.

[0995] A clear difference in disease burden can be seen between the control groups and some of the groups treated with the BCMA CAR T cells. The tool BCMA CAR T cells (BMCA-4NP) did not control the KMS-11 tumor growth as they had been shown to do so previously. However, some of the novel BCMA CAR T cells did show varying levels of efficacy in this multiple myeloma model. The % T/C values calculated at the endpoint for each group show stasis in tumor growth for the BCMA-10 and BCMA-13 groups. The mock transduced T cell group has a % T/C value of 61.56%, demonstrating that the mock transduced T cells have minimal to no anti-tumor activity. The percent delta T/C values for the BCMA-4P group is 32.03%, demonstrating some minimal anti-tumor efficacy after treatment with the tool BCMA CAR T cells. Both the BCMA-10 and BCMA-13 groups show stasis in tumor growth with T/C values of 0.07% and 6.04% respectively. The BCMA-4 shows an initial control in tumor growth, but with only one T cell dose given to each group, the tumors in this group start to grow out. The bioluminescence imaging results from a first experiment are shown in FIG. 25A. The PBS treatment group, which did not receive any T cells, demonstrates baseline KMS-11 tumor growth kinetics in intravenously implanted NSG mice. The Mock treatment group received untransduced T cells that underwent the same in vitro expansion process as the CAR T cells. These cells serve as a T cell control to show the non-specific response of the T cells in this tumor model. Both the PBS and Mock transduced T cell treatment groups demonstrate continuous tumor progression throughout the experiment. Among the BCMA CAR T cell groups, BCMA-4, BCMA-10, and BCMA-13 show anti-tumor activity, while the tool BCMA CAR T cells (BCMA-4NP) and BCMA-9 and BCMA-15 show no anti-tumor efficacy. A second experiment was performed and the bioluminescence imaging results are provided in FIG. 25B. Mice receiving untransduced T cells show the baseline KMS-11 tumor growth kinetics. BCMA-4NP* represents the results from the BCMA-4NP CART clones in the first experiment. In the second experiment, BCMA-10, BCMA-13, and BCMA-15 showed robust anti-tumor activity.

[0996] In addition to monitoring the disease burden via bioluminescence, the CAR⁺ T cell numbers in each group was also monitored vial peripheral blood FACS analysis. The FACS results of this study are shown in FIG. 26. The groups that show anti-tumor effects on the KMS-11 tumors also show CD4⁺ CAR⁺ and CD8⁺ CAR⁺ T cells expanding in the peripheral blood. The BCMA-4, BCMA-10, and BCMA-13 groups show a peak of CD4⁺CAR⁺proliferation between days 10 and 20 post T cell treatment. These same groups also show a prolonged CD8⁺CAR⁺ T cell expansion.

[0997] The anti-tumor activity of novel BCMA CAR transduced T cells was assessed in an efficacy study in NSG mice bearing a xenograft model of human multiple myeloma. These studies show that the KMS-11-luc model recapitulates human multiple myeloma in the NSG mouse and is capable of being targeted by BCMA CAR T cells (FIG. 24). Following the confirmation that this model is suitable to test BCMA CAR T cells, novel human BCMA CARs were tested in an efficacy study. This study demonstrated that several of the novel BCMA CARs (BCMA-4, BCMA-10, and BCMA-13) mounted an anti-tumor response in a xenograft model of multiple myeloma (FIG. 25A). The tumor experiment was repeated, testing BCMA-4, BCMA-10, BCMA-13, and BCMA-15. BCMA-4, BCMA-10, BCMA-13, and BCMA-15 demonstrated anti-tumor efficacy by inhibiting or reducing tumor growth for at least 4 weeks (28 days) after implantation (FIG. 25B).

[0998] In addition, the anti-tumor response correlates with the expansion of CD4⁺CAR⁺ and CD8⁺CAR⁺ T cells in the peripheral blood of these mice (FIGS. 26A, B, C, and D). No anti-tumor efficacy was observed for any of the BCMA CARs when this T cell expansion is not observed. BCMA-10, which shows the greatest anti-tumor efficacy in this model, also shows the most sustained CD8⁺CAR⁺ T cell expansion. The BCMA-4, BCMA-10 and BCMA-13 groups all show a significant change in tumor growth as compared to the control groups. The lack of efficacy seen with the tool BCMA CAR (BCMA-4NP) and BCMA-9 and BCMA-15 in the first tumor experiment (FIG. 25A) correlates with a lack of T cell expansion in the peripheral blood in the mice in these groups. Similarly, the lack of efficacy seen with BCMA-4NP in the second tumor experiment (FIG. 25B) correlates with the lack of T cell expansion in the peripheral blood in the mice.

[0999] Terminal bone marrow and spleen samples were also analyzed at the end of the in vivo tumor experiment to determine if the CART clones that demonstrated anti-tumor efficacy show a difference in being able to establish a bone marrow population compared to the groups that did not show anti-tumor efficacy. The number of CAR-expressing CD4+ and CD8+ T cells was determined in the bone marrow (FIGS. 27A and 27C) and the spleen (FIGS. 27B and 27D) of the mice from the first experiment. The results show that administration of BCMA-9 CART resulted in the highest number of CAR+ T cells (both CD4+ and CD8+ T cells) in the bone marrow and spleen, indicating that BCMA-9 CART cells undergo efficient expansion in vivo, but does not have killing capacity, or anti-tumor activity. BCMA-10 CART cells showed the next most consistent establishment of T cells in the bone marrow and spleen. BCMA-4 and BCMA-15 CART cells were also found in the spleen.

### Example 8

### Identifying Lead BCMA CAR Constructs for Therapy

[1000] To identify the lead BCMA CAR constructs, the results of several in vitro and in vivo assays. The experimental assays, the Examples in which the details of the assays are described, and the number of lead BCMA CARs resulting after analysis of the assay are summarized in the following table (Table 13). The results of the assays were analyzed in the order as listed in Table 13 to select the candidate BCMA CARs that exhibited specificity, expression in immune effector cells, and in vitro and/or in vivo activity.

TABLE 13
Assays for selecting BCMA CARs

| | Example where | | |
|---|---|---|---|
| | assay is | | BCMA CARs |
| Assay | described | Criteria | (out of 15) |
| CAR expression | Examples 5 | Yes | 14 |
| (Jurkat and/or | and 6 | | |
| primary T cells | | | |
| lentivirally | | | |
| transduced) | | | |
| JNL NFAT | Example 5 | >2-fold over | 10 |
| reporter | | negative control | |
| activation | | | |
| T-cell | Examples 5 | Size: 10 microns | 10 |
| expansion | and 6 | Cell count: >20- | |
| (Cell size, | | fold over T = 0 | |
| total cell | | cell number | |
| count) | | | |
| T-cell | | ≧1 log shift | 10 |
| proliferation | | relative to | |
| (CFSE stained | | negative control | |
| cells FACS) | | | |
| Target cell | Examples 5 | >90% killing | 7 |
| killing | and 6 | at E:T 3-fold < | |
| (CFSE or | | negative control | |
| luciferase) | | | |
| Tumor | Example 7 | Sustained tumor | 4 or 2 |
| regression | | regression > 2 | |
| (single dose | | weeks | |
| administration; | | Evidence of | |
| 1.5 × 10⁶ | | CAR+ T cell | |
| CAR+ T cells) | | expansion | |
| Lentiviral titer | Example 8 | Reproducibly | 4 or 2 |
| | | high viral titers | |

[1001] Based on in vitro assays, e.g., lentivirally transduced CAR expression, JNL NFAT activation, T cell expansion, T cell proliferation, and target cell killing (as described in Examples 5, 6 and 7), 7 BCMA CARs were identified as lead CARs to be tested for therapeutic efficacy in vivo, and 5 BCMA CARs (BCMA-4, BCMA-9, BCMA-10, BCMA-13, and BCMA-15) were tested in Example 8. As described in Example 8, BCMA-4, BCMA-10, BCMA-13, and BCMA-15 all demonstrated anti-tumor efficacy, with BCMA-10 and BCMA-13 reproducibly demonstrating anti-tumor efficacy in two separate in vivo experiments.

[1002] Lentiviral titer was compared between the candidate BCMA CARs after automated viral production and automated transduction of SupT1 cells. Two independent lentiviral titer assays were run. The first titer test run analyzed two independent DNA preps (A and B) of BMCA-4, BCMA-10, BCMA-13, and BCMA-15 CARs. The second titer test run analyzed three independent DNA preps (A, B and C) of BMCA-4, BCMA-10, BCMA-13, and BCMA-15 CARs. Viral production was produced in an automated 96-well format. SupT1 cell transduction was also performed via an automated 96-well format. CAR expression was manually analyzed by FACs and the results are shown in FIGS. 28A and 28B. All tested BCMA CARs showed comparable levels and consistency of viral titer.

[1003] Thus, taking together the results from the in vitro and in vivo experiments as outlined in Table 13, BMCA-4, BCMA-10, BCMA-13, and BCMA-15 were identified as having met the criteria for each assay and are good prospects for further testing for therapeutic use. When more stringent criteria was used in the tumor regression analysis, in which only CAR constructs that reproducibly demonstrated anti-tumor efficacy in both experiments were analyzed further, then BCMA-10 and BCMA-13 were identified for further therapeutic testing.

### Example 9

### Characterization of Lead BCMA CAR Constructs

[1004] Additional assays were performed to characterize properties of the lead BCMA CAR constructs BMCA-4, BCMA-10, BCMA-13, and BCMA-15 CARs that have demonstrated in vitro and in vivo efficacy in various assays described in Examples 5-8. Sequence alignment of BCMA-10 and BCMA-13 showed that the two CARs have identical heavy chain CDRs and high homology in the light chain CDRs. A competition assay was performed between four lead candidates BMCA-4, BCMA-10, BCMA-13, and BCMA-15 CARs and BCMA-4NP (tool CAR) as the control. BCMA-4NP was incubated with BCMA substrate, and binds between 50 and 300 seconds after incubation, as shown in FIG. 29. The four BCMA CAR constructs are added and binding to the substrate was monitored. As shown in FIG. 29, all four BCMA CAR constructs were competitive with the BCMA-4NP control, indicating that all four candidate BCMA CARs bind to the same epitope as the BCMA-4NP tool CAR. At the given concentrations, if the candidate CARs were binding to a different epitope, the expected RU change would be about 70 RU. The small RU change observed during binding of the candidate BCMA CARs was due to the slight dissociation of the BCMA-4NP control sample from BCMA.

[1005] Antibody affinity was also assessed for the candidate BCMA CARs: BCMA-4, BCMA-10, BCMA-13, and BMCA-15. The results are shown in FIG. 30, and summarized in the table below.

TABLE 14
BCMA CAR binding affinity

| Sample | Fit | ka | kd | KD |
|---|---|---|---|---|
| BCMA-10 | 1:1 Binding | 7.10E+04 | 2.39E−03 | 33.6 |
| BCMA-13 | 1:1 Binding | 6.56E+04 | 1.61E−03 | 24.5 |
| BCMA-15 | 1:1 Binding | 2.01E+05 | 1.87E−03 | 9.3 |
| BCMA-4 | 1:1 Binding | 6.17E+05 | 6.00E−04 | 1.0 |
| BCMA-4NP | 1:1 Binding | 1.58E+06 | 1.72E−04 | 0.1 |

[1006] BCMA-10 and BCMA-13 have similar affinities and are the lowest affinities of the tested candidates.

[1007] Selective binding of the candidate BCMA CARs was also tested. BCMA is one receptor in the TNF receptor family, includes closely related family members BaffR and TACI. BCMA has about 41% homology to BaffR and about 22% homology to TACI. T cells expressing the candidate BCMA CARs BCMA-4, BCMA-10, BCMA-13, and BCMA-15 were incubated with recombinant BCMA, BaffR, or TACI fused to Fc regions. Binding was assessed by staining CAR+ cells (FIG. 31). The results indicate that specific binding was only observed between all of the BCMA-expressing T cells and recombinant BCMA-Fc, demonstrating that the BCMA CAR constructs selectively bind to BCMA.

### Example 10

### BCMA Expression in the Brain

[1008] The tissue microarray results shown in Table 11 indicated that by immunohistochemical analysis, BCMA expression was detected in the cerebellum. Human and non-human primate formalin fixed paraffin embedded (FFPE) brain tissues were stained with anti-BCMA antibodies, e.g., USBio rabbit polyclonal antibody (0807-50G) raised to a BCMA intracellular epitope, and J6MO rabbit chimera antibody recognizing a BCMA extracellular epitope. Staining with the UsBio rabbit polyclonal antibody in non-primate human (cynomolgus macaque) brain tissue resulted in positive staining of the cerebellar climbing fibers (FIG. 32A) and the cell bodies in the inferior olivary nucleus (FIG. 32B) of the cerebellum. Staining of non-human primate brain tissue with J6MO resulted in BCMA positive staining only in the inferior olivary nucleus (FIG. 32C; Ig control staining in FIG. 32E). Similarly, staining of human brain tissue with J6MO also resulted in BCMA positive staining only in the inferior olivary nucleus (FIG. 32D; Ig control staining in FIG. 32F).

[1009] The immunohistochemistry results were confirmed by RNA analysis. In situ hybridization of non-human primate and human brain tissue was performed. Both the cerebellum and medulla oblongata was BCMA negative by mRNA detection by in situ hybridization (FIGS. 33A and 33B). Quantitative PCR was also performed on cerebellum, medulla oblongata, stomach, and kidney tissues from non-human primate (cynomolgus macaque) and human. The qPCR results indicate that BCMA mRNA was not detected in the cerebellum and the medulla oblongata of human (FIG. 33C) or non-human primate (FIG. 33D). The potential discrepancy between the immunohistochemical and RNA analysis may be due to the different BCMA splice variants known in the art (Smirnova et al., Mol Immunol, 2008, 45:1179-83).

[1010] RNAseq analysis, which would detect all BCMA isoforms and splice variants, was performed on normal tissues. The results show that little or no expression of BCMA was detected by RNAseq in normal tissue (FIG. 33E).

[1011] Further analysis is performed to determine whether the BCMA detected protein would be accessible to BCMA CART cells, and the implications for BCMA CART therapy. PCR probes are redesigned and BCMA splice variant expression is re-assessed. Single cell RNAseq in cerebellum samples is performed. Confocal microscopy analysis is performed to visualize intracellular staining. Mice are also evaluated for effects on the brain in efficacious CARTs, e.g., BCMA-10 and BCMA-13. To prevent potential trafficking of BCMA CART cells to the brain, natalizumab can be administered to subjects.

### Example 11

### BCMA CART Therapy in Relapsed/Refractory Myeloma

[1012] This example provides a single cohort, open-label pilot study to assess the safety and feasibility of infusion of autologous T cells expressing BCMA-specific CARs in relapsed and/or refractory multiple myeloma. The BCMA-CARs comprise tandem TCRζ and 4-1BB (TCRζ/4-1BB) costimulatory domains, and the T cells expressing the BCMA-CARs are referred to as BCMA CAR T cells.

[1013] Study Objectives

[1014] The primary objective of the study is to determine the safety and tolerability of BCMA CAR T cells in MM patients. The secondary objectives include: describe outcomes, including response rates, minimal residual disease (MRD) rates, progression-free and overall survival; and assess the feasibility of manufacturing BCMA CAR T cells. The exploratory objectives include: characterize BCMA CAR T cells with respect to their expansion, persistence, homing, phenotype and function; evaluate for development of cellular and/or humoral immunity against BCMA CAR T cells; evaluate effect of BCMA CAR T cells on B cell and plasma cell compartments, including immunoglobulin levels; determine the impact of BCMA CAR T cells on systemic soluble immune factors in patients; assess BCMA expression on MM cells pre- and post-treatment; and evaluate safety and efficacy of re-treatment with BCMA CAR T cells in patients who progress after prior clinical benefit

[1015] Study Duration

[1016] The duration of active intervention and monitoring is approximately 2 years. After 2 years, monitoring for delayed adverse events will transition to a separate long term follow-up protocol in accordance with FDA guidelines. The protocol will require approximately 12-18 months to complete enrollment.

[1017] Diagnosis and Main Inclusion Criteria

[1018] Up to 12 evaluable subjects will be enrolled.

[1019] Inclusion criteria include adult patients aged >18 with relapsed and/or refractory multiple myeloma after at least 3 prior lines of therapy that must include a prior alkylator, a proteasome inhibitor (PI) and immunomodulatory drug (IMiD) (or 2 priors if double-refractory to an IMiD (immunomodulatory drug, thalidomide and lenalidomide), and proteasome inhibitor). The patients have relapsed, defined as meeting IMWG (International Myeloma Working Group) criteria for PD) or are refractory, as defined as achieving <PR) after the most recent regimen. The patients have a limited prognosis (≦2 year expected survival) with currently available therapies.

[1020] Study Product, Dose, Route, Regimen

[1021] Single infusion of BCMA CAR T cells administered by intravenous infusion. Cohort 1 will receive 1-5×10⁸ BCMA CAR T cells alone, calculated as a range of 2-50% transduced cells in total cells (The cell dose in Cohort 1 may be decreased to 1-5×10⁷ BCMA CAR T cells (Cohort-1) if there is unexpected severe toxicity). Cohort 2 will receive cyclophosphamide (cytoxan) 1.5 g/m², administered by i.v. infusion, 1-3 days prior to infusion of 1-5×10⁷ BCMA CAR T cells. Cohort 3 will receive cyclophosphamide 1.5 g/m², administered by i.v. infusion, 1-3 days prior to infusion of 1-5×10⁸ BCMA CAR T cells.

[1022] Based on the total volume to be infused and the recommended infusion rate of 10-20 mL per minute. The dosage and regimens for each cohort is summarized in the table below and a schematic diagram is shown in FIG. 34.

TABLE 15
Summary of cohorts and dosages

| Cohort | Lymphodepleting chemo | BCMA-CAR T cell dose |
|---|---|---|
| −1 | — | 1 to 5 × 10⁷ |
| 1 (n = 3) | — | 1 to 5 × 10⁸ |
| 2 (n = 3) | Cytoxan 1.5 g/m² | 1 to 5 × 10⁷ |
| 3 (n = 6) | Cytoxan 1.5 g/m² | 1 to 5 × 10⁸ |

To prevent potential trafficking of T-cells to the brain, patients can be administered natalizumab (TYSABRI®).

[1023] Patient Monitoring

[1024] Tumor response will be measured by serum and urine protein electrophoresis and immunofixation; bone marrow biopsy; and imaging if skeletal lesions are present prior to treatment. Neural exams will also be performed before and after therapy to ensure no neural changes.

[1025] Statistical Methodology

[1026] The statistical analysis will be primarily descriptive in keeping with the exploratory nature of the study. Descriptive statistics will be applied to determine the relative engraftment, persistence and trafficking of the study drug components to blood and bone marrow. All adverse events will be described and exact 95% confidence intervals will be produced for adverse event rates, both overall and within major categories. Analysis of other secondary endpoints such as anti-tumor activity will also be primarily descriptive and may include summary statistics such as means and standard deviations or Kaplan-Meier curves for survival information.

### Example 12

### Cytokine Secretion from CART Cells

[1027] The ability of CART cells to secrete cytokines in response to target was determined. CART cells containing BCMA-10 CAR or untransduced T-cells were co-cultured with BCMA-positive (KMS11-luc) or BCMA negative (U87-luc) target cells, and the secretion of IL-2, IFNγ, and TNFα into the media was measured. Specifically, thawed CAR T cells containing either BCMA-10 CAR or untransduced were co-cultured with target cells for 20 h at an effector:target ratio of 2.5:1. Target cells included BCMA positive luciferized KMS-11 (KMS11-luc) or BCMA negative luciferized U87 cells (U87-luc). Effector cells were cultured in 96-well U-bottom plates with 3×10⁴ target cells in a total volume of 200 μL/well in complete T cell media. After 20 h, supernatants were removed from the cultures, and IFNγ, IL-2, and TNFα secretion were quantified by cytometric bead array (BD Bioscience) on FACS according to manufacturer's instructions. Measurements were in duplicate. Error bars represent the standard deviation (FIGS. 35A-35B). The results show that the BCMA-10 CARTs but not untransduced T-cells were stimulated to produce cytokines by BCMA-expressing but not BCMA-negative target cells (FIGS. 35A-35B).

### Example 13

### Function of BCMA-CART in Multiple Myeloma

[1028] Multiple Myeloma (MM) is a malignancy of plasma cells in the bone marrow with clinical features that include anemia, skin lesions, bone tenderness or pain, tiredness, osteolytic lesions, hypercalcemia, kidney failure and recurrent bacterial infection as most common. Despite the fact that recent treatments with drugs such as lenalidomide produce a significant increase in survival of relapsed MM, the disease is almost always incurable. The median 5-year survival rate is about 35%. Due to poor prognosis, an effective targeted therapy is needed.

[1029] Treatments using T-cells engineered to express chimeric antigen receptors (CAR) can result in promising immunotherapies for hematologic malignancies such as ALL. CARs contain a fusion protein that recognizes a cell-surface target protein expressed on a tumor cell. Differential gene expression studies have identified B-cell maturation antigen (BCMA, CD269) as a highly specific target antigen for malignant plasma cells and normal plasma cells; thus, BCMA is a potentially useful target antigen for CAR T cell therapy. See, e.g., Carpenter et al. Clin Cancer Res. 19.8(2013):2048-60.

[1030] BCMA is a member of the TNF-receptor superfamily. The protein is encoded by TNFRSF17 gene. BCMA is expressed in mature B lymphocytes. It binds to the tumor necrosis factor (ligand) superfamily, member 13b (TNFSF13B/TALL-1/BAFF), APRIL and to various TRAF family members. Interaction with their ligands leads to NF-kappaB and MAPK8/JNK signals that are linked to B cell development, long term plasma survival, and cell proliferation.

[1031] This example describes a preclinical study to evaluate the in vitro and in vivo function of huBCMA-BBz CAR-transduced T cells (CART-BCMA or BCMA-CART) that incorporates the BCMA10 scFv.

[1032] Materials

[1033] T Cells.

[1034] T cells from healthy donors were obtained from the University of Pennsylvania CFAR Human Immunology Core (Philadelphia, Pa.). Cells were prepared from the leukapheresis of healthy volunteer donors.

[1035] Medium.

[1036] RPMI medium (Gibco) supplemented with 10% Fetal Bovine serum and filtered (Valley Biomedical), 2 mM GlutaMax, (Invitrogen), 10 mM HEPES (Invitrogen), 100 U/ml Pencillin and 100 ug/ml Streptomycin (Gibco) was used.

[1037] CD3/28 Beads.

[1038] CD3/28 beads (GMP-grade) were manufactured by Clinical Cell and Vaccine Production Facility at University of Pennsylvania.

[1039] Plasmids.

[1040] The huBCMA-BBz CAR construct cloned in the pELPS lentiviral vector NVP-MCM998 was generated by Novartis.

[1041] Antibodies.

[1042] The antibodies, goat anti-human BCMA PE labeled (Biolegend cat #357504), and streptavidin (BD Biosciences), were used to detect BCMA expression on multiple myeloma cell lines. For CAR T cell expression, BCMA fc fusion protein (R&D Systems, cat #193-BC-050) was used followed by anti-human IgG fc-PE antibody (Biolengend, cat #409304).

[1043] PBS.

[1044] PBS was from Gibco.

[1045] Lentiviral Package.

[1046] PCL USUG, PRSV Rev, PGAG pol plasmids (Nature Technology corp. cat #NTC RP20) were used for huBCMA-BBz lentiviral preparation by transfecting with Lipofectamine 2000 (Invitrogen Cat #11668027) on 293T cells.

[1047] Cell Lines.

[1048] Human embryonic kidney 293T cells (ATCC cat #CRL-3216) were used for lentiviral preparation. Multiple Myeloma cell lines RPMI 8226 (ATCC cat #CCL-155), MM1S (ATCC cat #CRL-2974), U266 (ATCC cat #CRL-3216), NCI H929 (ATCC cat #CRL-9068) and OPM2 (DSMZ cat #ACC-50); and K562 (ATCC cat #CCL-256), or K562-BCMA cells (BCMA Lentiviral vector from Genecopoeia cat #Lv105) were used for functional experiments on CART-BCMA cells.

[1049] Methods

[1050] Lentiviral production protocol and titer determination. 293T cells were seeded at 8.10⁶ cells/per flask in a T150 flask (Corning Costar Cat. #430825) with RPMI1640 medium (Gibco Cat. #11875-080) supplemented with 10% FBS (ATCC cat #30-2020) and strep/penicillin (Invitrogen cat #10378-016) and transfected with packing plasmids mix (Nature Technology corp.) plus huBCMA-BBz encoding pELPS lentiviral vector for 24 hrs. The resulting viral preparation was stored at −80° C. Recombinant lentivirus was titered on CD4 T.

[1051] Transduction Protocol.

[1052] T cells obtained from the Human Immunology Core were washed once in media, re-suspended at 10⁶ cells/ml, and stimulated with CD3/28 beads at a cell:bead ratio of 1:3. Lentivirus transduction was performed on day 2 by mixing the lentivirus vector into the cell cultures at an MOI of 3.

[1053] T Cell Expansion.

[1054] Stimulated T cells were fed and split every 2-3 days to 0.8×10⁶ cells/ml for 7-9 days or until cells were rested as determined by decreased rate of cell division and a decrease in mean cellular volume to <˜300 fl.

[1055] Cell Cultures.

[1056] Multiple Myeloma cell lines and K562, K562 BCMA cell lines were cultured in RPMI with 10% FBS and antibiotics.

[1057] Cell Counting.

[1058] Cells were counted every 3 days during the expansion by gently mixing cultures and collecting 40 ul of cells from culture volume and placed into accuvettes (Beckman Coulter) with 20 ml Isoton II Diluent Buffer for counting using a Coulter Multisizer 3 (Beckman Coulter). The results of this test (absolute cell count and cell volume) were used to determine cell concentration, total cell numbers, growth rates, and dilution volumes.

[1059] ⁵¹Cr Release-Assay.

[1060] The ability of CART-BCMA cells to kill BCMA-expressing target cells was evaluated using a ⁵¹Cr release-assay. Briefly, target K562-BCMA cells (or control K562 cells) and multiple myeloma cell lines were labeled with ⁵¹Cr (Sodium Dichromate salt), washed and co-cultured with effector CART-BCMA or control non-transduced T cells (NTD) at different effector/target ratios. Supernatants were collected a 4-hrs, and placed into 96 well Lumaplates (Perkin Elmer). The amount of ⁵¹Cr released from the labeled target cells was measured on a liquid scintillation counter (MicroBeta trilux, Perkin Elmer). Target cells incubated in medium alone or with 1% SDS were used to determine spontaneous (S) or maximum (M)⁵¹Cr release. Percentage of specific lysis was calculated as follow: 100×(cpm experimental release−cpm S release)/(cpm M release−cpm S release).

[1061] CAR Detection on Transduced T Cells.

[1062] To evaluate transduction of CART-BCMA, T cells were stained with BCMA-Fc fusion protein (R&D Systems) followed by anti-human IgG Fc-PE antibody (Biolengend).

[1063] Flow Cytometry.

[1064] For anti-BCMA staining, human myeloma cell lines were stained with goat anti-human-PE BCMA antibody (Bioloegend) followed by streptavidin (BD Biosciences). Flow cytometry analysis for all experiments was carried out by using FlowJo (Tree Star, Inc.).

[1065] ELISA.

[1066] Target K562-BCMA cells (or control K562 cells) or multiple myeloma cell lines were combined with CAR-transduced T cells at a target:effector ratio 1:3 in duplicate wells of a 96 well flat bottom plate. ELISA assay was performed in a 1:10 dilution of supernatant collected after 16 hr of incubation by using the human IFNγ or IL2 Duoset ELISA kit (R&D) as recommended by the manufacturer.

[1067] Results

[1068] huBCMA-BBz was Highly Expressed on Transduced T Cells.

[1069] Freshly purified negatively selected normal human T cells were activated in vitro using CD3/28 beads (cell:bead ratio 1:3) and allowed to expand. On day 1 post-activation, cells were transduced with the preclinical lentiviral vector expressing huBMCA-BBz or mock transduced (NTD control). FIG. 36A shows the increase of total T cells during culture. BCMA-CART cells were counted every 3 days and adjusted for the ratio of split cells. T cells were enumerated using a Coulter Counter Multisizer III and fed every 2 days until the end of the expansion cycle (Day 7-9). On day 6 of ex vivo expansion, 200 ul of CART-BCMA or control NTD T cells were stained as described in the Methods section above. The live cell populations were gated using FCS vs. SSC. The flow acquisition was performed on a BC FACS Canto instrument and the flow analysis was performed using FlowJo software (TreeStar, Inc).

[1070] No differences in the proliferation rates of non transduced (NTD) and CART-BCMA cells were observed, indicating that lentiviral expression did not affect the proliferative potential of T cells (FIG. 36A). Transduction efficiency was evaluated at day 6 post-transduction as described in the methods section above. FIG. 36B shows that huBCMA-BBz transduction efficiency was 49%. These results demonstrate that huBCMA-BBz CAR was efficiently expressed on the surface of human T cells.

[1071] BCMA was Expressed at Different Levels on Multiple Myeloma Cell Lines.

[1072] BCMA surface expression on multiple myeloma cell lines was determined using flow cytometry staining. The live cell populations were gated by FCS/SCC parameters. The flow acquisition was done on a canto instrument and the flow analysis with FlowJo software. Most multiple myeloma cell lines tested showed strong BCMA expression, whereas RPMI 8226 and control K562-BCMA cells expressed lower levels of surface BCMA (FIG. 37). For all plots, the orange solid peak represents isotype control and the blue solid peak staining with BCMA antibody (FIG. 37). Flow cytometry staining revealed BCMA expression on the surface of the multiple myeloma cell lines NCI H929, U266, RPMI 8226, OPM2 and MM1S, as well as by K562-BCMA cells. BCMA was not detected on the surface of K562 cell line (FIG. 37). These results demonstrate that BCMA was expressed by several multiple myeloma cell lines with expression levels varying by about 1 log.

[1073] CART-BCMA Cells Produced Cytokines and Showed Cytotoxic Properties Specifically in Response to Different BCMA-Expressing, Multiple Myeloma Cell Lines.

[1074] The ability of CART-BCMA cells to produce cytokines and kill BCMA+ target cells was determined. CART-BCMA cells (huBCMA-BBz transduced T cells) or control non transduced T cells (NTD) were co-cultured in duplicates for 16 hrs with K562, K562-BCMA or multiple myeloma cell lines (MM1S, OPM2, or U266). Cells were co-cultured at a 3:1 ratio of T cell to target cells. Cell-free supernatant was harvested and the production of IL2 or IFNγ was evaluated as described in the Methods section above.

[1075] CART-BCMA cells specifically produced IL2 or IFNγ in the presence of K562 engineered to express BCMA (K562-BCMA) compared to non-antigen-expressing, wildtype K562 cells. CART-BCMA cells were also able to produce cytokines in the presence of U266, OPM2 and MM1S multiple myeloma cell lines (FIGS. 38A-38B). These results demonstrate that in the presence of BCMA+ target cell lines, CART-BCMA cells produced proinflammatory cytokines.

[1076] Another in vitro measure for the anti-tumor effectiveness of CART-BCMA cells is their ability to kill BCMA+ target cells. T cells were activated and transduced, as described above, e.g., in relation to FIGS. 36A-36B. BCMA10 CAR T cells were co-cultured with ⁵¹Cr-labeled K562-BCMA, RPMI 8226 or MM1S cell lines for 4 hrs at the effector to target ratios (E:T Ratio) indicated in FIGS. 39A-39C (E:T of 0, 10, 20, or 30) and percentage of lysis was calculated as described in the Methods section above. FIG. 39A shows that CART-BCMA cells specifically killed K562-BCMA cells. CART-BCMA cells also efficiently killed the BCMA^{high} multiple myeloma cell line MM1S and the BCMA^{low} RPMI 8226 cell line in a 4-hr cytotoxicity assay (FIGS. 39B, 39C). These results demonstrate that CART-BCMA displayed enhanced cytotoxic activity (⁵¹Cr assay) against multiple myeloma cell lines.

[1077] Antitumor Activity of CART-BCMA Cells In Vivo

[1078] Using RPMI 8226 cells, which show lower levels of BCMA expression compared to many other myeloma cells lines, a mouse model was established to evaluate the capacity of CART-BCMA to recognize and eliminate tumors produced by the BCMA^{low} RPMI 8226 cell line engineered to express Click-beetle green luciferase (CBG) for bioluminenscence imaging (BLI). NOD/SCID/γ-chain^{-/-} (NSG) mice with established intravenous RPMI 8226 tumors received intravenous injections of CART-BCMA cells (N=10) or non transduced control T cells (NTD) (N=10) on day 30 following tumor cell inoculation. NSG mice engrafted with RPMI-8226 cells were treated with 5×10⁶ CART-BCMA T cells at day 30 following tumor cell injection. Myeloma tumor progression was followed by in vivo BLI (BLI of ventral and dorsal mouse areas once per week) up to 9 weeks post-T cell infusion (14 weeks post-tumor injection).

[1079] Non-transduced T cells failed to control the tumors, and all mice had to be euthanized due to disease progression 10-11 weeks after tumor injection (FIGS. 40A and 40C). In contrast, mice receiving CART-BCMA cells showed control of tumor growth in most mice resulting in 80% survival of CART-BCMA-treated mice at 10 weeks post-tumor cell inoculation compared with 0% survival of the NTD control-treated mice (FIGS. 40B and 40C). These results demonstrate that intramedullary RPMI 8226 tumors were inhibited by CART-BCMA treatment.

### Example 14

### BCMA-CART Dosing Scheme

[1080] A BCMA CART cell therapy, e.g., a BCMA CART cell therapy described herein, can be administered to patients, e.g., multiple myeloma patients, according to a dosing regimen described herein, e.g., a dosing regimen described as follows.

[1081] Leukopheresis is performed on the patient prior to receiving a BCMA CART therapy to obtain autologous T cells. Manufacturing and/or cryopreservation of the BCMA lentiCAR T cells is performed. Patients may receive therapy during manufacturing to maintain disease control. Some patients may receive a lympho-depleting therapy (e.g., cytoxan) before CART cell administration. For example, a lympho-depleting chemotherapy, e.g., cytoxan (e.g., at 1.5 g/m²) is administered to the patient. In other dosing regimens, a lympho-depleting chemotherapy is not administered to the patient. Patients are then treated with BCMA CART cells according to a dosing regimen described herein.

[1082] A dosing regimen involves dose fractionation, e.g., where a certain percentage of the total dose of cells is delivered on a first day of treatment, a different percentage of the total dose of cells is delivered on a subsequent day of treatment, and a different percentage of the total dose of cells is delivered on a yet subsequent day of treatment. For example, 10% of the total dose of cells is delivered on the first day, 30% of the total dose of cells is delivered on the second day, and the remaining 60% of the total dose of cells is delivered on the third day of treatment. For example, a total cell dose includes 1 to 5×10⁷ or 1 to 5×10⁸ BCMA-CART cells.

[1083] In one dosing regimen, no lympho-depleting chemotherapy is administered, and a total BCMA-CART cell dose of 1 to 5×10⁷ is administered (e.g., by infusion) with 10% of the cell dose on day 1 of treatment, 30% on day 2 of treatment, and 60% on day 3 of treatment. In another dosing regimen, no lympho-depleting chemotherapy is administered, and a total BCMA-CART cell dose of 1 to 5×10⁸ is administered (e.g., by infusion) with 10% of the cell dose on day 1 of treatment, 30% on day 2 of treatment, and 60% on day 3 of treatment. In another dosing regimen, a lympho-depleting chemotherapy (cytoxan at 1.5 g/m²) is administered three days before BCMA-CART cell administration, and then a total BCMA-CART cell dose of 1 to 5×10⁷ is administered (e.g., by infusion) with 10% of the cell dose on day 1 of treatment, 30% on day 2 of treatment, and 60% on day 3 of treatment. In yet another dosing regimen, a lympho-depleting chemotherapy (cytoxan at 1.5 g/m²) is administered three days before BCMA-CART cell administration, and then a total BCMA-CART cell dose of 1 to 5×10⁸ is administered (e.g., by infusion) with 10% of the cell dose on day 1 of treatment, 30% on day 2 of treatment, and 60% on day 3 of treatment.

[1084] Clinical lab assessments are performed on days 1, 2, 4, 7, 14, 21, 28, every 4 weeks, after CART cell administration (with day 0 being the first day of CART dosing). Multiple myeloma assessments are performed pre-CART dosing, on the first day of CART dosing (day 0), and days 14, 28, and every 4 weeks. Bone marrow aspirate/biopsy (bx) is performed pre-CART dosing, and on days 28 and 90 after CART dosing. After the first 28 days of CART treatment, follow-up is performed every 4 weeks up to 6 months, then every 3 months, up to 2 years.

### Example 15

### Low Dose RAD001 Stimulates CART Proliferation in a Cell Culture Model

[1085] The effect of low doses of RAD001 on CAR T cell proliferation in vitro was evaluated by co-culturing CART-expressing cells with target cells in the presence of different concentrations of RAD001.

[1086] Materials and Methods

[1087] Generation of CAR-Transduced T Cells

[1088] A humanized, anti-human CD19 CAR (huCART19) lentiviral transfer vector was used to produce the genomic material packaged into VSVg pseudotyped lentiviral particles. The amino acid and nucleotide sequence of the humanized anti-human CD19 CAR (huCART19) is CAR 1, ID 104875 described in PCT publication, WO2014/153270, filed Mar. 15, 2014, and is designated SEQ ID NOs. 85 and 31 therein.

[1089] Lentiviral transfer vector DNA is mixed with the three packaging components VSVg env, gag/pol and rev in combination with lipofectamine reagent to transfect Lenti-X 293T cells. Medium is changed after 24 h and 30 h thereafter, the virus-containing media is collected, filtered and stored at −80° C. CARTs are generated by transduction of fresh or frozen näive T cells obtained by negative magnetic selection of healthy donor blood or leukopak. T cells are activated by incubation with anti-CD3/anti-CD28 beads for 24 h, after which viral supernatant or concentrated virus (MOI=2 or 10, respectively) is added to the cultures. The modified T cells are allowed to expand for about 10 days. The percentage of cells transduced (expressing the CARs on the cell surface) and the level of CAR expression (relative fluorescence intensity, Geo Mean) are determined by flow cytometric analysis between days 7 and 9. The combination of slowing growth rate and T cell size approaching ˜350 fL determines the state for T cells to be cryopreserved for later analysis.

[1090] Evaluating Proliferation of CARTs

[1091] To evaluate the functionality of CARTs, the T cells are thawed and counted, and viability is assessed by Cellometer. The number of CAR-positive cells in each culture is normalized using non-transduced T cells (UTD). The impact of RAD001 on CARTs was tested in titrations with RAD001, starting at 50 nM. The target cell line used in all co-culture experiments is Nalm-6, a human pre-B cell acute lymphoblastic leukemia (ALL) cell line expressing CD19 and transduced to express luciferase.

[1092] For measuring the proliferation of CARTs, T cells are cultured with target cells at a ratio of 1:1. The assay is run for 4 days, when cells are stained for CD3, CD4, CD8 and CAR expression. The number of T cells is assessed by flow cytometry using counting beads as reference.

[1093] Results

[1094] The proliferative capacity of CART cells was tested in a 4 day co-culture assay. The number of CAR-positive CD3-positive T cells (dark bars) and total CD3-positive T cells (light bars) was assessed after culturing the CAR-transduced and non-transduced T cells with Nalm-6 (FIG. 43). huCART19 cells expanded when cultured in the presence of less than 0.016 nM of RAD001, and to a lesser extent at higher concentrations of the compound. Importantly, both at 0.0032 and 0.016 nM RAD001 the proliferation was higher than observed without the addition of RAD001. The non-transduced T cells (UTD) did not show detectable expansion.

### Example 16

### Low Dose RAD001 Stimulates CART Expansion In Vivo

[1095] This example evaluates the ability of huCAR19 cells to proliferate in vivo with different concentrations of RAD001.

[1096] Materials and Methods:

[1097] NALM6-Luc Cells:

[1098] The NALM6 human acute lymphoblastic leukemia (ALL) cell line was developed from the peripheral blood of a patient with relapsed ALL. The cells were then tagged with firefly luciferase. These suspension cells grow in RPMI supplemented with 10% heat inactivated fetal bovine serum.

[1099] Mice:

[1100] 6 week old NSG (NOD.Cg-Prkdc^{scid}Il2rg^{tmIWjl}/SzJ) mice were received from the Jackson Laboratory (stock number 005557).

[1101] Tumor Implantation:

[1102] NALM6-luc cells were grown and expanded in vitro in RPMI supplemented with 10% heat inactivated fetal bovine serum. The cells were then transferred to a 15 ml conical tube and washed twice with cold sterile PBS. NALM6-luc cells were then counted and resuspended at a concentration of 10×10⁶ cells per milliliter of PBS. The cells were placed on ice and immediately (within one hour) implanted in the mice. NALM6-luc cells were injected intravenously via the tail vein in a 100 μl volume, for a total of 1×10⁶ cells per mouse.

[1103] CAR T Cell Dosing:

[1104] Mice were administered 5×10⁶ CART cells 7 days after tumor implantation. Cells were partially thawed in a 37 degree Celsius water bath and then completely thawed by the addition of 1 ml of cold sterile PBS to the tube containing the cells. The thawed cells were transferred to a 15 ml falcon tube and adjusted to a final volume of 10 mls with PBS. The cells were washed twice at 1000 rpm for 10 minutes each time and then counted on a hemocytometer. T cells were then resuspended at a concentration of 50×10⁶ CAR T cells per ml of cold PBS and kept on ice until the mice were dosed. The mice were injected intravenously via the tail vein with 100 μl of the CAR T cells for a dose of 5×10⁶ CAR T cells per mouse. Eight mice per group were treated either with 100 μl of PBS alone (PBS), or humanized CD19 CAR T cells.

[1105] RAD001 Dosing:

[1106] A concentrated micro-emulsion of 50 mg equal to 1 mg RAD001 was formulated and then resuspended in D5W (dextrose 5% in water) at the time of dosing. Mice were orally dosed daily (via oral gavage) with 200 μl of the desired doses of RAD001.

[1107] PK Analysis:

[1108] Mice were dosed daily with RAD001 starting 7 days post tumor implantation. Dosing groups were as follows: 0.3 mg/kg, 1 mg/kg, 3 mg/kg, and 10 mg/kg. Mice were bled on days 0 and 14 following the first and last dose of RAD001, at the following time points for PK analysis: 15 minutes, 30 minutes, 1 hour, 2 hours, 4 hours, 8 hours, 12 hours, and 24 hours.

[1109] Results:

[1110] The expansion and pharmacokinetics of RAD001 was tested in NSG mice with NALM6-luc tumors. Daily oral dosing of RAD001 alone did not have an impact on the growth of NALM6-luc tumors (FIG. 44). The pharmacokinetic analysis of RAD001 shows that it is fairly stable in the blood of tumor bearing mice (FIGS. 45A and 45B). Both the day 0 and day 14 PK analyses show that the RAD001 concentrations in the blood is above 10 nm even 24 hours after dosing at the lowest dose tested (0.3 mg/kg).

[1111] Based on these doses, huCAR19 CAR T cells were dosed with and without RAD001 to determine the proliferative ability of these cells. The highest dose used was 3 mg/kg based on the levels of RAD001 in the blood 24 hours after dosing. As the concentration of RAD001 was above 10 nM 24 hours after the final dose of RAD001, several lower doses of RAD001 were used in the in vivo study with CAR T cells. The CAR T cells were dosed IV one day prior to the start of the daily oral RAD001 dosing. Mice were monitored via FACS for T cell expansion.

[1112] The lowest doses of RAD001 show an enhanced proliferation of the CAR T cells (FIG. 46). This enhanced proliferation is more evident and prolonged with the CD4⁺ CAR T cells than the CD8⁺ CAR T cells. However, with the CD8⁺ CAR T cells, enhanced proliferation can be seen at early time points following the CAR T cell dose.

### Example 17

### CD19 CAR T Cells for Use in Treating Multiple Myeloma

[1113] Even with current regimens of chemotherapy, targeted therapies, and autologous stem cell transplant, myeloma is considered an incurable disease. The present example describes treating multiple myeloma (MM) with autologous T cells directed to CD19 with a chimeric antigen receptor (lentivirus/CD19:4-1BB:CD3zeta; also known as “CART19” or CTL019). This example demonstrates that CD19-directed CAR therapies have the potential to establish deep, long-term durable remissions based on targeting the myeloma stem cell and/or tumor cells that express very low (undetectable by most methods) levels of CD19.

[1114] In treating a patient with an aggressive secondary plasma cell leukemia, we found that CART19 administered two days after a salvage autologous stem cell transplant resulted in rapid clearance of plasma cell leukemia and a very good partial response in a patient who had progressed through multiple lines of chemotherapy. This patient was transfusion-dependent for months prior to the treatment; at two months after the treatment, she has recovered her blood counts (with normal-range platelet counts and white blood cell counts) and has not required transfusions since she was discharged from the hospital from her treatment.

[1115] Because myeloma cells do not naturally express CD19, the finding that CART19 treatment induced a rapid and significant tumor response in this tumor was surprising. Without wishing to be bound by a particular theory, it was reasoned that CART19 could be used to treat myeloma because: (1) while myeloma cells are traditionally thought to be negative for CD19 expression by flow cytometry, there are data indicating that myeloma cells may express very low levels of CD19, such that expression is detectable by RNA but not by flow cytometry or immunohistochemistry; and (2) the concept of targeting the clonotypic B cell, which is thought to be the cancerous stem cell that gives rise to multiple myeloma, and is particularly resistant to chemotherapy. There is a clonal relationship between B cells and myeloma tumor cells, but traditional myeloma therapy is aimed at the malignant plasma cells rather than B cells. CART19 for treating myeloma therefore targets a different cell population than most myeloma therapies.

[1116] In our single patient experience, the patient had circulating plasma cells, and we were able to test her tumor cells for the expression of CD19. Approximately 1-2% of her tumor cells expressed the CD19 antigen. (FIG. 47). Thus, it was reasoned that CART19 may have a direct effect on a very small population of her tumor cells; a very good partial response, though would not have been predicted based on targeting only the very small population of CD19+ tumor cells.

[1117] In this case, CART19 was administered following autologous stem cell transplant rescue after high-dose melphalan. Although this is a standard therapy in myeloma, it is not curative. Furthermore, this patient had previously undergone tandem autologous stem cell transplants and relapsed early (<6 months) after transplant. Without wishing to be bound by a particular theory, use of CART19 cells as described in the present example may have a non-overlapping mechanism in the treatment of myeloma when combined with a salvage autologous stem cell transplant.

[1118] A patient with refractory multiple myeloma was treated with CTL019 after myeloablative chemotherapy and ASCT. Remission was maintained despite loss of detectable CTL019 and reconstitution of normal CD19-positive B cells, indicating that this response did not require sustained CTL019 activity. Moreover, this patient's response was realized even though the vast majority (99.95%) of the neoplastic plasma cells were CD19-negative by both flow cytometry and RT-PCR.

[1119] The absence of detectable CD19 expression in this patient's dominant neoplastic plasma cell population suggests that the clinically relevant target of CTL019 resided outside this dominant CD19-negative population. Neoplastic plasma cells in multiple myeloma patients exhibit genetic, immunophenotypic, and functional heterogeneity. Particular subpopulations may be required for survival of the clone through anti-myeloma therapy. In the patient reported here, for example, the small CD19-expressing subset of plasma cells might have been relatively melphalan-resistant but sensitive to CTL019. This finding suggests that therapeutically targeting a small subset of the clone can lead to durable clinical benefit when coupled with conventional anti-myeloma therapy.

[1120] Alternatively, the clinically relevant target of CTL019 in this patient may have resided outside the neoplastic plasma cell population. For instance, the CTL019 may target a stem cell population that is relatively small but gives rise to neoplastic plasma cells. Multiple myeloma may therefore be a disease of multiple late B-lineage cell types, not just terminally differentiated plasma cells, such that therapies like CTL019 that target B lymphocytes might be useful adjuncts to therapies that directly target plasma cells.

[1121] Ten additional multiple myeloma patients will be treated with CART19 in a Phase I trial, at least three patients have been treated to date.

[1122] Dose Rationale

[1123] With the first 3 patients, we have observed clinical activity at doses ranging from 1.4×10⁷ to 1.1×10⁹ CART-19 cells. This observation demonstrates, at least in the first 3 patients treated, that there is not an obvious dose response relationship. A complete response was observed in patients administered with two log fold difference in dose. Thus, unlike standard drugs that are metabolized, CAR T cells can have a wide dose response range. This is most likely because the CAR T cells are able to proliferate extensively in the patients. We therefore set a dose range of 1-5×10⁸ CART-19 cells for infusion. In this single-patient study offered on a compassionate use basis, the patient was offered up to 5×10⁸ CART19 cells, with no lower dose limit. For the ten patient trial, patients will be offered 1-5×10⁷ CART-19 cells.

[1124] General Design

[1125] This was single patient-study offered on a compassionate use basis; it was modeled after a Phase I study to determine if the infusion of autologous T cells transduced to express CART-19 is safe. The primary goals of the study were to determine the safety, tolerability and engraftment potential of CART-19 T cells in patients undergoing salvage ASCT after early relapse following first ASCT. The protocol consists of an open label pilot study.

[1126] At entry subjects will undergo a bone marrow biopsy and routine laboratory and imaging assessment of their MM. Eligible subjects will undergo steady-state apheresis to obtain large numbers of peripheral blood mononuclear cells (PBMC) for CART-19 manufacturing. The T cells will be purified from the PBMC, transduced with TCRζ/4-1BB lentiviral vector, expanded in vitro and then frozen for future administration. The number of patients who have inadequate T cell collections, expansion or manufacturing compared to the number of patients who have T cells successfully manufactured will be recorded; feasibility of product manufacturing is not expected to be problematic in this patient population.

[1127] Subjects will generally have had adequate peripheral blood stem cells remaining stored from the mobilization/collection performed in preparation for their first ASCT to conduct two additional ASCT. Those who do not will undergo a second mobilization/collection procedure either before or after their steady-state apheresis with a regimen according to the treating physician's preference. Approximately two weeks after the initial leukapheresis, subjects will be admitted to the hospital and receive high-dose melphalan (day −2) followed by infusion of autologous stem cells two days later (day 0), and all subjects will receive infusion of CART-19 cells twelve to fourteen days later (day +12-14). Up to 10 patients will be enrolled.

[1128] All subjects will have blood tests to assess safety, and engraftment and persistence of the CART-19 cells at regular intervals through week 4 of the study. At day+42 and day+100, subjects will undergo bone marrow aspirates/biopsies to assess the bone marrow plasma cell burden and trafficking of CART-19 cells to the bone marrow. A formal response assessment will be made at day 100 according to International Myeloma Working Group (IMWG) criteria136, and TTP will be monitored according to routine clinical practice for patients with multiple myeloma. The main efficacy outcome measured in this study will be a comparison of TTP after a patient's initial ASCT to TTP after the ASCT on this study.

[1129] Treatment Regimen

[1130] Therapy for Relapsed/Progressive Multiple Myeloma

[1131] Patients may receive, prior to enrollment, therapy for relapsed/progressive multiple myeloma according to the preference of their treating physicians. Therapy may continue upon enrollment.

[1132] Patients must stop all therapy for two weeks prior to apheresis and for two weeks prior to high-dose melphalan. If more than two weeks are expected to lapse between apheresis and high-dose melphalan, patients may resume therapy after apheresis at the discretion of their treating physicians.

[1133] High-dose Melphalan (day −2)

[1134] Patients will be admitted to the hospital on day −3 or −2 and will undergo examination by the attending physician and routine laboratory tests, which will include monitoring parameters for tumor lysis syndrome, prior to commencement of the treatment protocol. Blood for MM monitoring laboratory tests (SPEP, quantitative immunoglobulins, and serum free light chain analysis), will be drawn prior to initiation of therapy if such tests had not been drawn within 7 days of admission.

[1135] High-dose therapy will consist of melphalan at a dose of 200 mg/m² administered intravenously over approximately 20 minutes on day −2. The dose of melphalan will be reduced to 140 mg/m² for patients >70 years of age or for patients of any age whom, at the discretion of the treating physician, may not tolerate a dose of 200 mg/m² All patients will receive standard anti-emetic prophylaxis, which may include dexamethasone, and standard antibiotic prophylaxis.

[1136] Stem-Cell Re-Infusion (Day 0)

[1137] Stem cell infusion will take place on day 0, at least 18 hours after the administration of the high-dose melphalan. Stem cells will be infused intravenously over approximately 20-60 minutes following premedication according to standard institutional practice. At least 2×10⁶ CD34+ progenitors/kg body weight should be infused. In addition, at least 1×10⁶ CD34+ progenitors/kg body weight should be available as a back-up stem-cell product to be infused in the event of delayed engraftment or late graft failure. G-CSF should be administered SQ beginning on day +5, dosed according to standard institutional practice. Other supportive care measures such as transfusion support will be done in accordance with standard institutional guidelines.

[1138] CART19 Cell Infusion (Day+12-14)

[1139] A single dose of CART-19 transduced T cells will be given consisting of up to 5×10⁷ CART-19 cells. The minimal acceptable dose for infusion of cells transduced with the CD19 TCRζ4-1BB vector is 1×10⁷. CART-19 cells will be given as a single dose by rapid i.v. infusion on day +12-14 after stern cell infusion. If patient fails to meet any of the inclusion criteria described herein in the 12-14 day window, the CART-19 infusion may be delayed beyond day +12-14 until the criteria is satisfied.

[1140] Maintenance Lenalidomide

[1141] Subjects who received and tolerated maintenance lenalidomide after their first ASCT will re-initiate lenalidomide maintenance therapy at approximately day +100, assuming there are no contraindications in the judgment of the treating physician. The starting dose will be 10 mg daily unless prior experience dictates an alternative starting dose for a particular patient. Maintenance therapy will continue until disease progression or intolerance.

[1142] Administration of Study Drug

[1143] The infusion will take place in an isolated room in Rhoads, using precautions for immunosuppressed patients. The transduced T cells will be administered by rapid intravenous infusion at a flow rate of approximately 10 mL to 20 ml per minute through an 18-gauge latex free Y-type blood set with a 3-way stopcock. The duration of the infusion will be based on the total volume to be infused and the recommended infusion rate. Each infusion bag will have affixed to it a label containing the following: “FOR AUTOLOGOUS USE ONLY.” In addition the label will have at least two unique identifiers such as the subject's initials, birth date, and study number. Prior to the infusion, two individuals will independently verify all this information in the presence of the subject and so confirm that the information is correctly matched to the participant.

[1144] Packaging

[1145] Infusion will be comprised of a single dose of 1-5×10⁷ CA T19-transduced cells, with a minimal acceptable dose of 1×10⁷ CART-19 cells for infusion. Each bag will contain an aliquot (volume dependent upon dose) of cryomedia containing the following infusible grade reagents (% v/v): 31.25% plasmalyte-A, 31.25% dextrose (5%), 0.45% NaCl, up to 7.5% DMSO, 1% dextran 40, 5% human serum albumin.

[1146] Apheresis

[1147] A large volume (12-15 liters or 4-6 blood volumes) apheresis procedure is carried out at the apheresis center. PBMC are obtained for CART-19 during this procedure. From a single leukapheresis, the intention is to harvest at least 5×10⁹ white blood cells to manufacture CART-19 T cells. Baseline blood leukocytes for FDA look-back requirements and for research are also obtained and cryopreserved. The cell product is expected to be ready for release approximately 2-4 weeks later. Flow cytometry lymphocyte subset quantitation, including CD19 and CD20 B cell determination. Baseline assessment is made for human anti-VSV-G and anti-murine antibody (HAMA). If a subject has previously had an adequate apberesis collection banked according to current Good Manufacturing Practices at the Clinical Cell and Vaccine Production Facility these cells may be used as the source of cells for CART-19 manufacturing. Using a banked apheresis product would avert the expense, time, and risk to the subject of undergoing an additional apheresis collection.

[1148] Cytoreductive Chemotherapy

[1149] The lymphodepleting chemotherapy will be high-dose melphalan as described herein.

[1150] CART-19 Infusion

[1151] Infusion will begin on day +12-14 after stem-cell reinfusion.

[1152] On day +12-14 prior to the first infusion, patients will have a CBC with differential, and assessment of CD3, CD4 and CD8 counts since chemotherapy is given in part to induce lymphopenia.

[1153] The first dose will be administered using a single dose. The cells are thawed at the patient's bedside. The thawed cells will be given at as rapid an infusion rate as tolerated such that the duration of the infusion will be approximately 10-15 minutes. In order to facilitate mixing, the cells will be administered simultaneously using a Y-adapter. Subjects will be infused and premedicated as described herein. Subjects' vital signs will be assessed and pulse oxymetry done prior to dosing, at the end of the infusion, and every 15 minutes thereafter for 1 hour and until these are stable and satisfactory. A blood sample for determination of a baseline CART-19 level is obtained any time prior to the first infusion and 20 minutes to 4 hours after each infusion (and sent to TCSL).

### Results

[1154] Three treatment-refractory, advanced multiple myeloma patients have now been treated with CTL019 in this ongoing trial. Results for two of these patients show that both have had substantial anti-tumor effects from the CTL019 therapy based on the primary efficacy assessment at the three-month time-point. The third patient has not yet reached the three-month time point. The results for the two patients are described in more detail below.

[1155] The first myeloma patient has completed her +100 day response assessment and she had a very good response to the CART19 therapy. The following tests were performed with the following results:
[1156] SPEP/immunofixation: negative
[1157] urine immunofixation: faint unmeasurable kappa light chain band on her immunofixation (also present at day 38, so not new)

[1158] Otherwise, the patient met the criteria for stringent complete remission including:
[1159] serum free light chain ratio: normal
[1160] bone marrow biopsy: negative
[1161] IgA immunophenotyping: IgA is below the limit of detection

[1162] Other than the faint unmeasurable kappa light chain result from urine immunofixation, the patient met all criteria for “stringent complete remission”. The summary of the plasma cell immunophenotyping at 3 time points (day −2, day +38, day +103) is shown in FIG. 39, and demonstrates that the patient's IgA is below the limit of detection. The summary shows heavy myeloma burden at day −2 and none detectable at day +38 and +103, which classifies the patient as “MRD negative” by flow analysis. At day +103, the summary shows recovery of normal, polyclonal, CD19+ plasma cells and B cells. The patient had no symptoms of disease or therapy and is functioning like a normal person.

[1163] The second patient treated has not yet reached the +100 day time point. However, at this time point, she is doing well but it is too early to determine the effect of the CTL019 infusion.

### EQUIVALENTS

[1164] The disclosures of each and every patent, patent application, and publication cited herein are hereby incorporated herein by reference in their entirety. While this invention has been disclosed with reference to specific aspects, it is apparent that other aspects and variations of this invention may be devised by others skilled in the art without departing from the true spirit and scope of the invention. The appended claims are intended to be construed to include all such aspects and equivalent variations.

The application's sequence listing, which the Patent Office published only in electronic form, follows.

SEQUENCE LISTING (1103 sequences)

SEQ ID NO: 1 - protein, 21 aa, Artificial Sequence
  source: /note="Description of Artificial Sequence: Synthetic peptide"
MALPVTALLLPLALLLHAARP

SEQ ID NO: 2 - protein, 45 aa, Artificial Sequence
  source: /note="Description of Artificial Sequence: Synthetic polypeptide"
TTTPAPRPPTPAPTIASQPLSLRPEACRPAAGGAVHTRGLDFACD

SEQ ID NO: 3 - protein, 230 aa, Artificial Sequence
  source: /note="Description of Artificial Sequence: Synthetic polypeptide"
ESKYGPPCPPCPAPEFLGGPSVFLFPPKPKDTLMISRTPEVTCVVVDVSQEDPEVQFNWYVDGVEVHNAKTKPREEQFNSTYRVVSVLTVLHQDWLNGKEYKCKVSNKGLPSSIEKTISKAKGQPREPQVYTLPPSQEEMTKNQVSLTCLVKGFYPSDIAVEWESNGQPENNYKTTPPVLDSDGSFFLYSRLTVDKSRWQEGNVFSCSVMHEALHNHYTQKSLSLSLGKM

SEQ ID NO: 4 - protein, 282 aa, Artificial Sequence
  source: /note="Description of Artificial Sequence: Synthetic polypeptide"
RWPESPKAQASSVPTAQPQAEGSLAKATTAPATTRNTGRGGEEKKKEKEKEEQEERETKTPECPSHTQPLGVYLLTPAVQDLWLRDKATFTCFVVGSDLKDAHLTWEVAGKVPTGGVEEGLLERHSNGSQSQHSRLTLPRSLWNAGTSVTCTLNHPSLPPQRLMALREPAAQAPVKLSLNLLASSDPPEAASWLLCEVSGFSPPNILLMWLEDQREVNTSGFAPARPPPQPGSTTFWAWSVLRVPAPPSPQPATYTCVVSHEDSRTLLNASRSLEVSYVTDH

SEQ ID NO: 5 - protein, 10 aa, Artificial Sequence
  source: /note="Description of Artificial Sequence: Synthetic peptide"
GGGGSGGGGS

SEQ ID NO: 6 - protein, 24 aa, Artificial Sequence
  source: /note="Description of Artificial Sequence: Synthetic peptide"
IYIWAPLAGTCGVLLLSLVITLYC

SEQ ID NO: 7 - protein, 42 aa, Artificial Sequence
  source: /note="Description of Artificial Sequence: Synthetic polypeptide"
KRGRKKLLYIFKQPFMRPVQTTQEEDGCSCRFPEEEEGGCEL

SEQ ID NO: 8 - protein, 48 aa, Artificial Sequence
  source: /note="Description of Artificial Sequence: Synthetic polypeptide"
QRRKYRSNKGESPVEPAEPCRYSCPREEEGSTIPIQEDYRKPEPACSP

SEQ ID NO: 9 - protein, 112 aa, Artificial Sequence
  source: /note="Description of Artificial Sequence: Synthetic polypeptide"
RVKFSRSADAPAYKQGQNQLYNELNLGRREEYDVLDKRRGRDPEMGGKPRRKNPQEGLYNELQKDKMAEAYSEIGMKGERRRGKGHDGLYQGLSTATKDTYDALHMQALPPR

SEQ ID NO: 10 - protein, 112 aa, Homo sapiens
RVKFSRSADAPAYQQGQNQLYNELNLGRREEYDVLDKRRGRDPEMGGKPRRKNPQEGLYNELQKDKMAEAYSEIGMKGERRRGKGHDGLYQGLSTATKDTYDALHMQALPPR

SEQ ID NO: 11 - DNA, 1184 bp, Artificial Sequence
  source: /note="Description of Artificial Sequence: Synthetic polynucleotide"
cgtgaggctccggtgcccgtcagtgggcagagcgcacatcgcccacagtccccgagaagttggggggaggggtcggcaattgaaccggtgcctagagaaggtggcgcggggtaaactgggaaagtgatgtcgtgtactggctccgcctttttcccgagggtgggggagaaccgtatataagtgcagtagtcgccgtgaacgttctttttcgcaacgggtttgccgccagaacacaggtaagtgccgtgtgtggttcccgcgggcctggcctctttacgggttatggcccttgcgtgccttgaattacttccacctggctgcagtacgtgattcttgatcccgagcttcgggttggaagtgggtgggagagttcgaggccttgcgcttaaggagccccttcgcctcgtgcttgagttgaggcctggcctgggcgctggggccgccgcgtgcgaatctggtggcaccttcgcgcctgtctcgctgctttcgataagtctctagccatttaaaatttttgatgacctgctgcgacgctttttttctggcaagatagtcttgtaaatgcgggccaagatctgcacactggtatttcggtttttggggccgcgggcggcgacggggcccgtgcgtcccagcgcacatgttcggcgaggcggggcctgcgagcgcggccaccgagaatcggacgggggtagtctcaagctggccggcctgctctggtgcctggcctcgcgccgccgtgtatcgccccgccctgggcggcaaggctggcccggtcggcaccagttgcgtgagcggaaagatggccgcttcccggccctgctgcagggagctcaaaatggaggacgcggcgctcgggagagcgggcgggtgagtcacccacacaaaggaaaagggcctttccgtcctcagccgtcgcttcatgtgactccacggagtaccgggcgccgtccaggcacctcgattagttctcgagcttttggagtacgtcgtctttaggttggggggaggggttttatgcgatggagtttccccacactgagtgggtggagactgaagttaggccagcttggcacttgatgtaattctccttggaatttgccctttttgagtttggatcttggttcattctcaagcctcagacagtggttcaaagtttttttcttccatttcaggtgtcgtga

SEQ ID NO: 12 - DNA, 63 bp, Artificial Sequence
  source: /note="Description of Artificial Sequence: Synthetic oligonucleotide"
atggccctgcctgtgacagccctgctgctgcctctggctctgctgctgcatgccgctagaccc

SEQ ID NO: 13 - DNA, 135 bp, Artificial Sequence
  source: /note="Description of Artificial Sequence: Synthetic polynucleotide"
accacgacgccagcgccgcgaccaccaacaccggcgcccaccatcgcgtcgcagcccctgtccctgcgcccagaggcgtgccggccagcggcggggggcgcagtgcacacgagggggctggacttcgcctgtgat

SEQ ID NO: 14 - DNA, 690 bp, Artificial Sequence
  source: /note="Description of Artificial Sequence: Synthetic polynucleotide"
gagagcaagtacggccctccctgccccccttgccctgcccccgagttcctgggcggacccagcgtgttcctgttcccccccaagcccaaggacaccctgatgatcagccggacccccgaggtgacctgtgtggtggtggacgtgtcccaggaggaccccgaggtccagttcaactggtacgtggacggcgtggaggtgcacaacgccaagaccaagccccgggaggagcagttcaatagcacctaccgggtggtgtccgtgctgaccgtgctgcaccaggactggctgaacggcaaggaatacaagtgtaaggtgtccaacaagggcctgcccagcagcatcgagaaaaccatcagcaaggccaagggccagcctcgggagccccaggtgtacaccctgccccctagccaagaggagatgaccaagaaccaggtgtccctgacctgcctggtgaagggcttctaccccagcgacatcgccgtggagtgggagagcaacggccagcccgagaacaactacaagaccaccccccctgtgctggacagcgacggcagcttcttcctgtacagccggctgaccgtggacaagagccggtggcaggagggcaacgtctttagctgctccgtgatgcacgaggccctgcacaaccactacacccagaagagcctgagcctgtccctgggcaagatg

SEQ ID NO: 15 - DNA, 847 bp, Artificial Sequence
  source: /note="Description of Artificial Sequence: Synthetic polynucleotide"
aggtggcccgaaagtcccaaggcccaggcatctagtgttcctactgcacagccccaggcagaaggcagcctagccaaagctactactgcacctgccactacgcgcaatactggccgtggcggggaggagaagaaaaaggagaaagagaaagaagaacaggaagagagggagaccaagacccctgaatgtccatcccatacccagccgctgggcgtctatctcttgactcccgcagtacaggacttgtggcttagagataaggccacctttacatgtttcgtcgtgggctctgacctgaaggatgcccatttgacttgggaggttgccggaaaggtacccacagggggggttgaggaagggttgctggagcgccattccaatggctctcagagccagcactcaagactcacccttccgagatccctgtggaacgccgggacctctgtcacatgtactctaaatcatcctagcctgcccccacagcgtctgatggcccttagagagccagccgcccaggcaccagttaagcttagcctgaatctgctcgccagtagtgatcccccagaggccgccagctggctcttatgcgaagtgtccggctttagcccgcccaacatcttgctcatgtggctggaggaccagcgagaagtgaacaccagcggcttcgctccagcccggcccccaccccagccgggttctaccacattctgggcctggagtgtcttaagggtcccagcaccacctagcccccagccagccacatacacctgtgttgtgtcccatgaagatagcaggaccctgctaaatgcttctaggagtctggaggtttcctacgtgactgaccatt

SEQ ID NO: 16 - DNA, 30 bp, Artificial Sequence
  source: /note="Description of Artificial Sequence: Synthetic oligonucleotide"
ggtggcggaggttctggaggtggaggttcc

SEQ ID NO: 17 - DNA, 72 bp, Artificial Sequence
  source: /note="Description of Artificial Sequence: Synthetic oligonucleotide"
atctacatctgggcgcccttggccgggacttgtggggtccttctcctgtcactggttatcaccctttactgc

SEQ ID NO: 18 - DNA, 126 bp, Artificial Sequence
  source: /note="Description of Artificial Sequence: Synthetic polynucleotide"
aaacggggcagaaagaaactcctgtatatattcaaacaaccatttatgagaccagtacaaactactcaagaggaagatggctgtagctgccgatttccagaagaagaagaaggaggatgtgaactg

SEQ ID NO: 19 - DNA, 123 bp, Artificial Sequence
  source: /note="Description of Artificial Sequence: Synthetic polynucleotide"
aggagtaagaggagcaggctcctgcacagtgactacatgaacatgactccccgccgccccgggcccacccgcaagcattaccagccctatgccccaccacgcgacttcgcagcctatcgctcc

SEQ ID NO: 20 - DNA, 336 bp, Artificial Sequence
  source: /note="Description of Artificial Sequence: Synthetic polynucleotide"
agagtgaagttcagcaggagcgcagacgcccccgcgtacaagcagggccagaaccagctctataacgagctcaatctaggacgaagagaggagtacgatgttttggacaagagacgtggccgggaccctgagatggggggaaagccgagaaggaagaaccctcaggaaggcctgtacaatgaactgcagaaagataagatggcggaggcctacagtgagattgggatgaaaggcgagcgccggaggggcaaggggcacgatggcctttaccagggtctcagtacagccaccaaggacacctacgacgcccttcacatgcaggccctgccccctcgc

SEQ ID NO: 21 - DNA, 336 bp, Homo sapiens
agagtgaagttcagcaggagcgcagacgcccccgcgtaccagcagggccagaaccagctctataacgagctcaatctaggacgaagagaggagtacgatgttttggacaagagacgtggccgggaccctgagatggggggaaagccgagaaggaagaaccctcaggaaggcctgtacaatgaactgcagaaagataagatggcggaggcctacagtgagattgggatgaaaggcgagcgccggaggggcaaggggcacgatggcctttaccagggtctcagtacagccaccaaggacacctacgacgcccttcacatgcaggccctgccccctcgc

SEQ ID NO: 22 - protein, 373 aa, Artificial Sequence
  source: /note="Description of Artificial Sequence: Synthetic polypeptide"
PGWFLDSPDRPWNPPTFSPALLVVTEGDNATFTCSFSNTSESFVLNWYRMSPSNQTDKLAAFPEDRSQPGQDCRFRVTQLPNGRDFHMSVVRARRNDSGTYLCGAISLAPKAQIKESLRAELRVTERRAEVPTAHPSPSPRPAGQFQTLVTTTPAPRPPTPAPTIASQPLSLRPEACRPAAGGAVHTRGLDFACDIYIWAPLAGTCGVLLLSLVITLYCKRGRKKLLYIFKQPFMRPVQTTQEEDGCSCRFPEEEEGGCELRVKFSRSADAPAYKQGQNQLYNELNLGRREEYDVLDKRRGRDPEMGGKPRRKNPQEGLYNELQKDKMAEAYSEIGMKGERRRGKGHDGLYQGLSTATKDTYDALHMQALPPR

SEQ ID NO: 23 - DNA, 1182 bp, Artificial Sequence
  source: /note="Description of Artificial Sequence: Synthetic polynucleotide"
atggccctccctgtcactgccctgcttctccccctcgcactcctgctccacgccgctagaccacccggatggtttctggactctccggatcgcccgtggaatcccccaaccttctcaccggcactcttggttgtgactgagggcgataatgcgaccttcacgtgctcgttctccaacacctccgaatcattcgtgctgaactggtaccgcatgagcccgtcaaaccagaccgacaagctcgccgcgtttccggaagatcggtcgcaaccgggacaggattgtcggttccgcgtgactcaactgccgaatggcagagacttccacatgagcgtggtccgcgctaggcgaaacgactccgggacctacctgtgcggagccatctcgctggcgcctaaggcccaaatcaaagagagcttgagggccgaactgagagtgaccgagcgcagagctgaggtgccaactgcacatccatccccatcgcctcggcctgcggggcagtttcagaccctggtcacgaccactccggcgccgcgcccaccgactccggccccaactatcgcgagccagcccctgtcgctgaggccggaagcatgccgccctgccgccggaggtgctgtgcatacccggggattggacttcgcatgcgacatctacatttgggctcctctcgccggaacttgtggcgtgctccttctgtccctggtcatcaccctgtactgcaagcggggtcggaaaaagcttctgtacattttcaagcagcccttcatgaggcccgtgcaaaccacccaggaggaggacggttgctcctgccggttccccgaagaggaagaaggaggttgcgagctgcgcgtgaagttctcccggagcgccgacgcccccgcctataagcagggccagaaccagctgtacaacgaactgaacctgggacggcgggaagagtacgatgtgctggacaagcggcgcggccgggaccccgaaatgggcgggaagcctagaagaaagaaccctcaggaaggcctgtataacgagctgcagaaggacaagatggccgaggcctactccgaaattgggatgaagggagagcggcggaggggaaaggggcacgacggcctgtaccaaggactgtccaccgccaccaaggacacatacgatgccctgcacatgcaggcccttccccctcgc

SEQ ID NO: 24 - protein, 394 aa, Artificial Sequence
  source: /note="Description of Artificial Sequence: Synthetic polypeptide"
MALPVTALLLPLALLLHAARPPGWFLDSPDRPWNPPTFSPALLVVTEGDNATFTCSFSNTSESFVLNWYRMSPSNQTDKLAAFPEDRSQPGQDCRFRVTQLPNGRDFHMSVVRARRNDSGTYLCGAISLAPKAQIKESLRAELRVTERRAEVPTAHPSPSPRPAGQFQTLVTTTPAPRPPTPAPTIASQPLSLRPEACRPAAGGAVHTRGLDFACDIYIWAPLAGTCGVLLLSLVITLYCKRGRKKLLYIFKQPFMRPVQTTQEEDGCSCRFPEEEEGGCELRVKFSRSADAPAYKQGQNQLYNELNLGRREEYDVLDKRRGRDPEMGGKPRRKNPQEGLYNELQKDKMAEAYSEIGMKGERRRGKGHDGLYQGLSTATKDTYDALHMQALPPR

SEQ ID NO: 25 - protein, 5 aa, Artificial Sequence
  source: /note="Description of Artificial Sequence: Synthetic peptide"
GGGGS

SEQ ID NO: 26 - protein, 30 aa, Artificial Sequence
  source: /note="Description of Artificial Sequence: Synthetic polypeptide"
  misc_feature (1)..(30): /note="This sequence may encompass 1-6 'Gly Gly Gly Gly Ser' repeating units, wherein some positions may be absent"
  source: /note="See specification as filed for detailed description of substitutions and preferred embodiments"
GGGGSGGGGSGGGGSGGGGSGGGGSGGGGS

SEQ ID NO: 27 - protein, 20 aa, Artificial Sequence
  source: /note="Description of Artificial Sequence: Synthetic peptide"
GGGGSGGGGSGGGGSGGGGS

SEQ ID NO: 28 - protein, 15 aa, Artificial Sequence
  source: /note="Description of Artificial Sequence: Synthetic peptide"
GGGGSGGGGSGGGGS

SEQ ID NO: 29 - protein, 4 aa, Artificial Sequence
  source: /note="Description of Artificial Sequence: Synthetic peptide"
GGGS

SEQ ID NO: 30 - DNA, 5000 bp, Artificial Sequence
  source: /note="Description of Artificial Sequence: Synthetic polynucleotide"
  misc_feature (1)..(5000): /note="This sequence may encompass 50-5,000 nucleotides, wherein some positions may be absent"
  source: /note="See specification as filed for detailed description of substitutions and preferred embodiments"
aaaaaaaaaaaaaaaaaaaaaaaaaaaaaaaaaaaaaaaaaaaaaaaaaaaaaaaaaaaaaaaaaaaaaaaaaaaaaaaaaaaaaaaaaaaaaaaaaaaaaaaaaaaaaaaaaaaaaaaaaaaaaaaaaaaaaaaaaaaaaaaaaaaaaaaaaaaaaaaaaaaaaaaaaaaaaaaaaaaaaaaaaaaaaaaaaaaaaaaaaaaaaaaaaaaaaaaaaaaaaaaaaaaaaaaaaaaaaaaaaaaaaaaaaaaaaaaaaaaaaaaaaaaaaaaaaaaaaaaaaaaaaaaaaaaaaaaaaaaaaaaaaaaaaaaaaaaaaaaaaaaaaaaaaaaaaaaaaaaaaaaaaaaaaaaaaaaaaaaaaaaaaaaaaaaaaaaaaaaaaaaaaaaaaaaaaaaaaaaaaaaaaaaaaaaaaaaaaaaaaaaaaaaaaaaaaaaaaaaaaaaaaaaaaaaaaaaaaaaaaaaaaaaaaaaaaaaaaaaaaaaaaaaaaaaaaaaaaaaaaaaaaaaaaaaaaaaaaaaaaaaaaaaaaaaaaaaaaaaaaaaaaaaaaaaaaaaaaaaaaaaaaaaaaaaaaaaaaaaaaaaaaaaaaaaaaaaaaaaaaaaaaaaaaaaaaaaaaaaaaaaaaaaaaaaaaaaaaaaaaaaaaaaaaaaaaaaaaaaaaaaaaaaaaaaaaaaaaaaaaaaaaaaaaaaaaaaaaaaaaaaaaaaaaaaaaaaaaaaaaaaaaaaaaaaaaaaaaaaaaaaaaaaaaaaaaaaaaaaaaaaaaaaaaaaaaaaaaaaaaaaaaaaaaaaaaaaaaaaaaaaaaaaaaaaaaaaaaaaaaaaaaaaaaaaaaaaaaaaaaaaaaaaaaaaaaaaaaaaaaaaaaaaaaaaaaaaaaaaaaaaaaaaaaaaaaaaaaaaaaaaaaaaaaaaaaaaaaaaaaaaaaaaaaaaaaaaaaaaaaaaaaaaaaaaaaaaaaaaaaaaaaaaaaaaaaaaaaaaaaaaaaaaaaaaaaaaaaaaaaaaaaaaaaaaaaaaaaaaaaaaaaaaaaaaaaaaaaaaaaaaaaaaaaaaaaaaaaaaaaaaaaaaaaaaaaaaaaaaaaaaaaaaaaaaaaaaaaaaaaaaaaaaaaaaaaaaaaaaaaaaaaaaaaaaaaaaaaaaaaaaaaaaaaaaaaaaaaaaaaaaaaaaaaaaaaaaaaaaaaaaaaaaaaaaaaaaaaaaaaaaaaaaaaaaaaaaaaaaaaaaaaaaaaaaaaaaaaaaaaaaaaaaaaaaaaaaaaaaaaaaaaaaaaaaaaaaaaaaaaaaaaaaaaaaaaaaaaaaaaaaaaaaaaaaaaaaaaaaaaaaaaaaaaaaaaaaaaaaaaaaaaaaaaaaaaaaaaaaaaaaaaaaaaaaaaaaaaaaaaaaaaaaaaaaaaaaaaaaaaaaaaaaaaaaaaaaaaaaaaaaaaaaaaaaaaaaaaaaaaaaaaaaaaaaaaaaaaaaaaaaaaaaaaaaaaaaaaaaaaaaaaaaaaaaaaaaaaaaaaaaaaaaaaaaaaaaaaaaaaaaaaaaaaaaaaaaaaaaaaaaaaaaaaaaaaaaaaaaaaaaaaaaaaaaaaaaaaaaaaaaaaaaaaaaaaaaaaaaaaaaaaaaaaaaaaaaaaaaaaaaaaaaaaaaaaaaaaaaaaaaaaaaaaaaaaaaaaaaaaaaaaaaaaaaaaaaaaaaaaaaaaaaaaaaaaaaaaaaaaaaaaaaaaaaaaaaaaaaaaaaaaaaaaaaaaaaaaaaaaaaaaaaaaaaaaaaaaaaaaaaaaaaaaaaaaaaaaaaaaaaaaaaaaaaaaaaaaaaaaaaaaaaaaaaaaaaaaaaaaaaaaaaaaaaaaaaaaaaaaaaaaaaaaaaaaaaaaaaaaaaaaaaaaaaaaaaaaaaaaaaaaaaaaaaaaaaaaaaaaaaaaaaaaaaaaaaaaaaaaaaaaaaaaaaaaaaaaaaaaaaaaaaaaaaaaaaaaaaaaaaaaaaaaaaaaaaaaaaaaaaaaaaaaaaaaaaaaaaaaaaaaaaaaaaaaaaaaaaaaaaaaaaaaaaaaaaaaaaaaaaaaaaaaaaaaaaaaaaaaaaaaaaaaaaaaaaaaaaaaaaaaaaaaaaaaaaaaaaaaaaaaaaaaaaaaaaaaaaaaaaaaaaaaaaaaaaaaaaaaaaaaaaaaaaaaaaaaaaaaaaaaaaaaaaaaaaaaaaaaaaaaaaaaaaaaaaaaaaaaaaaaaaaaaaaaaaaaaaaaaaaaaaaaaaaaaaaaaaaaaaaaaaaaaaaaaaaaaaaaaaaaaaaaaaaaaaaaaaaaaaaaaaaaaaaaaaaaaaaaaaaaaaaaaaaaaaaaaaaaaaaaaaaaaaaaaaaaaaaaaaaaaaaaaaaaaaaaaaaaaaaaaaaaaaaaaaaaaaaaaaaaaaaaaaaaaaaaaaaaaaaaaaaaaaaaaaaaaaaaaaaaaaaaaaaaaaaaaaaaaaaaaaaaaaaaaaaaaaaaaaaaaaaaaaaaaaaaaaaaaaaaaaaaaaaaaaaaaaaaaaaaaaaaaaaaaaaaaaaaaaaaaaaaaaaaaaaaaaaaaaaaaaaaaaaaaaaaaaaaaaaaaaaaaaaaaaaaaaaaaaaaaaaaaaaaaaaaaaaaaaaaaaaaaaaaaaaaaaaaaaaaaaaaaaaaaaaaaaaaaaaaaaaaaaaaaaaaaaaaaaaaaaaaaaaaaaaaaaaaaaaaaaaaaaaaaaaaaaaaaaaaaaaaaaaaaaaaaaaaaaaaaaaaaaaaaaaaaaaaaaaaaaaaaaaaaaaaaaaaaaaaaaaaaaaaaaaaaaaaaaaaaaaaaaaaaaaaaaaaaaaaaaaaaaaaaaaaaaaaaaaaaaaaaaaaaaaaaaaaaaaaaaaaaaaaaaaaaaaaaaaaaaaaaaaaaaaaaaaaaaaaaaaaaaaaaaaaaaaaaaaaaaaaaaaaaaaaaaaaaaaaaaaaaaaaaaaaaaaaaaaaaaaaaaaaaaaaaaaaaaaaaaaaaaaaaaaaaaaaaaaaaaaaaaaaaaaaaaaaaaaaaaaaaaaaaaaaaaaaaaaaaaaaaaaaaaaaaaaaaaaaaaaaaaaaaaaaaaaaaaaaaaaaaaaaaaaaaaaaaaaaaaaaaaaaaaaaaaaaaaaaaaaaaaaaaaaaaaaaaaaaaaaaaaaaaaaaaaaaaaaaaaaaaaaaaaaaaaaaaaaaaaaaaaaaaaaaaaaaaaaaaaaaaaaaaaaaaaaaaaaaaaaaaaaaaaaaaaaaaaaaaaaaaaaaaaaaaaaaaaaaaaaaaaaaaaaaaaaaaaaaaaaaaaaaaaaaaaaaaaaaaaaaaaaaaaaaaaaaaaaaaaaaaaaaaaaaaaaaaaaaaaaaaaaaaaaaaaaaaaaaaaaaaaaaaaaaaaaaaaaaaaaaaaaaaaaaaaaaaaaaaaaaaaaaaaaaaaaaaaaaaaaaaaaaaaaaaaaaaaaaaaaaaaaaaaaaaaaaaaaaaaaaaaaaaaaaaaaaaaaaaaaaaaaaaaaaaaaaaaaaaaaaaaaaaaaaaaaaaaaaaaaaaaaaaaaaaaaaaaaaaaaaaaaaaaaaaaaaaaaaaaaaaaaaaaaaaaaaaaaaaaaaaaaaaaaaaaaaaaaaaaaaaaaaaaaaaaaaaaaaaaaaaaaaaaaaaaaaaaaaaaaaaaaaaaaaaaaaaaaaaaaaaaaaaaaaaaaaaaaaaaaaaaaaaaaaaaaaaaaaaaaaaaaaaaaaaaaaaaaaaaaaaaaaaaaaaaaaaaaaaaaaaaaaaaaaaaaaaaaaaaaaaaaaaaaaaaaaaaaaaaaaaaaaaaaaaaaaaaaaaaaaaaaaaaaaaaaaaaaaaaaaaaaaaaaaaaaaaaaaaaaaaaaaaaaaaaaaaaaaaaaaaaaaaaaaaaaaaaaaaaaaaaaaaaaaaaaaaaaaaaaaaaaaaaaaaaaaaaaaaaaaaaaaaaaaaaaaaaaaaaaaaaaaaaaaaaaaaaaaaaaaaaaaaaaaaaaaaaaaaaaaaaaaaaaaaaaaaaaaaaaaaaaaaaaaaaaaaaaaaaaaaaaaaaaaaaaaaaaaaaaaaaaaaaaaaaaaaaaaaaaaaaaaaaaaaaaaaaaaaaaaaaaaaaaaaaaaaaaaaaaaaaaaaaaaaaaaaaaaaaaaaaaaaaaaaaaaaaaaaaaaaaaaaaaaaaaaaaaaaaaaaaaaaaaaaaaaaaaaaaaaaaaaaaaaaaaaaaaaaaaaaaaaaaaaaaaaaaaaaaaaaaaaaaaaaaaaaaaaaaaaaaaaaaaaaaaaaaaaaaaaaaaaaaaaaaaaaaaaaaaaaaaaaaaaaaaaaaaaaaaaaaaaaaaaaaaaaaaaaaaaaaaaaaaaaaaaaaaaaaaaaaaaaaaaaaaaaaaaaaaaaaaaaaaaaaaaaaaaaaaaaaaaaaaaaaaaaaaaaaaaaaaaaaaaaaaaaaaaaaaaaaaaaaaaaaaaaaaaaaaaaaaaaaaaaaaaaaaaaaaaaaaaaaaaaaaaaaaaaaaaaaaaaaaaaaaaaaaaaaaaaaaaaaaaaaaaaaaaaaaaaaaaaaaaaaaaaaaaaaaaaaaaaaaaaaaaaaaaaaaaaaaaaaaaaaaaaaaaaaaaaaaaaaaaaaaaaaaaaaaaaaaaaaaaaaaaaaaaaaaaaaaaaaaaaaaaaaaaaaaaaaaaaaaaaaaaaaaaaaaaaaaaaaaaaaaaaaaaaaaaaaaaaaaaaaaaaaaaaaaaaaaaaaaaaaaaaaaaaaaaaaaaaaaaaaaaaaaaaaaaaaaaaaaaaaaaaaaaaaaaaaaaaaaaaaaaaaaaaaaaaaaaaaaaaaaaaaaaaaaaaaaaaaaaaaaaaaaaaaaaaaaaaaaaaaaaaaaaaaaaaaaaaaaaaaaaaaaaaaaaaaaaaaaaaaaaaaaaaaaaaaaaaaaaaaaaaaaaaaaaaaaaaaaaaaaaaaaaaaaaaaaaaaaaaaaaaaaaaaaaaaaaaaaaaaaaaaaaaaaaaaaaaaaaaaaaaaaaaaaaaaaaaaaaaaaaaaaaaaaaaaaaaaaaaaa

SEQ ID NO: 31 - DNA, 100 bp, Artificial Sequence
  source: /note="Description of Artificial Sequence: Synthetic polynucleotide"
tttttttttttttttttttttttttttttttttttttttttttttttttttttttttttttttttttttttttttttttttttttttttttttttttttt

SEQ ID NO: 32 - DNA, 5000 bp, Artificial Sequence
  source: /note="Description of Artificial Sequence: Synthetic polynucleotide"
  misc_feature (1)..(5000): /note="This sequence may encompass 50-5,000 nucleotides, wherein some positions may be absent"
tttttttttttttttttttttttttttttttttttttttttttttttttttttttttttttttttttttttttttttttttttttttttttttttttttttttttttttttttttttttttttttttttttttttttttttttttttttttttttttttttttttttttttttttttttttttttttttttttttttttttttttttttttttttttttttttttttttttttttttttttttttttttttttttttttttttttttttttttttttttttttttttttttttttttttttttttttttttttttttttttttttttttttttttttttttttttttttttttttttttttttttttttttttttttttttttttttttttttttttttttttttttttttttttttttttttttttttttttttttttttttttttttttttttttttttttttttttttttttttttttttttttttttttttttttttttttttttttttttttttttttttttttttttttttttttttttttttttttttttttttttttttttttttttttttttttttttttttttttttttttttttttttttttttttttttttttttttttttttttttttttttttttttttttttttttttttttttttttttttttttttttttttttttttttttttttttttttttttttttttttttttttttttttttttttttttttttttttttttttttttttttttttttttttttttttttttttttttttttttttttttttttttttttttttttttttttttttttttttttttttttttttttttttttttttttttttttttttttttttttttttttttttttttttttttttttttttttttttttttttttttttttttttttttttttttttttttttttttttttttttttttttttttttttttttttttttttttttttttttttttttttttttttttttttttttttttttttttttttttttttttttttttttttttttttttttttttttttttttttttttttttttttttttttttttttttttttttttttttttttttttttttttttttttttttttttttttttttttttttttttttttttttttttttttttttttttttttttttttttttttttttttttttttttttttttttttttttttttttttttttttttttttttttttttttttttttttttttttttttttttttttttttttttttttttttttttttttttttttttttttttttttttttttttttttttttttttttttttttttttttttttttttttttttttttttttttttttttttttttttttttttttttttttttttttttttttttttttttttttttttttttttttttttttttttttttttttttttttttttttttttttttttttttttttttttttttttttttttttttttttttttttttttttttttttttttttttttttttttttttttttttttttttttttttttttttttttttttttttttttttttttttttttttttttttttttttttttttttttttttttttttttttttttttttttttttttttttttttttttttttttttttttttttttttttttttttttttttttttttttttttttttttttttttttttttttttttttttttttttttttttttttttttttttttttttttttttttttttttttttttttttttttttttttttttttttttttttttttttttttttttttttttttttttttttttttttttttttttttttttttttttttttttttttttttttttttttttttttttttttttttttttttttttttttttttttttttttttttttttttttttttttttttttttttttttttttttttttttttttttttttttttttttttttttttttttttttttttttttttttttttttttttttttttttttttttttttttttttttttttttttttttttttttttttttttttttttttttttttttttttttttttttttttttttttttttttttttttttttttttttttttttttttttttttttttttttttttttttttttttttttttttttttttttttttttttttttttttttttttttttttttttttttttttttttttttttttttttttttttttttttttttttttttttttttttttttttttttttttttttttttttttttttttttttttttttttttttttttttttttttttttttttttttttttttttttttttttttttttttttttttttttttttttttttttttttttttttttttttttttttttttttttttttttttttttttttttttttttttttttttttttttttttttttttttttttttttttttttttttttttttttttttttttttttttttttttttttttttttttttttttttttttttttttttttttttttttttttttttttttttttttttttttttttttttttttttttttttttttttttttttttttttttttttttttttttttttttttttttttttttttttttttttttttttttttttttttttttttttttttttttttttttttttttttttttttttttttttttttttttttttttttttttttttttttttttttttttttttttttttttttttttttttttttttttttttttttttttttttttttttttttttttttttttttttttttttttttttttttttttttttttttttttttttttttttttttttttttttttttttttttttttttttttttttttttttttttttttttttttttttttttttttttttttttttttttttttttttttttttttttttttttttttttttttttttttttttttttttttttttttttttttttttttttttttttttttttttttttttttttttttttttttttttttttttttttttttttttttttttttttttttttttttttttttttttttttttttttttttttttttttttttttttttttttttttttttttttttttttttttttttttttttttttttttttttttttttttttttttttttttttttttttttttttttttttttttttttttttttttttttttttttttttttttttttttttttttttttttttttttttttttttttttttttttttttttttttttttttttttttttttttttttttttttttttttttttttttttttttttttttttttttttttttttttttttttttttttttttttttttttttttttttttttttttttttttttttttttttttttttttttttttttttttttttttttttttttttttttttttttttttttttttttttttttttttttttttttttttttttttttttttttttttttttttttttttttttttttttttttttttttttttttttttttttttttttttttttttttttttttttttttttttttttttttttttttttttttttttttttttttttttttttttttttttttttttttttttttttttttttttttttttttttttttttttttttttttttttttttttttttttttttttttttttttttttttttttttttttttttttttttttttttttttttttttttttttttttttttttttttttttttttttttttttttttttttttttttttttttttttttttttttttttttttttttttttttttttttttttttttttttttttttttttttttttttttttttttttttttttttttttttttttttttttttttttttttttttttttttttttttttttttttttttttttttttttttttttttttttttttttttttttttttttttttttttttttttttttttttttttttttttttttttttttttttttttttttttttttttttttttttttttttttttttttttttttttttttttttttttttttttttttttttttttttttttttttttttttttttttttttttttttttttttttttttttttttttttttttttttttttttttttttttttttttttttttttttttttttttttttttttttttttttttttttttttttttttttttttttttttttttttttttttttttttttttttttttttttttttttttttttttttttttttttttttttttttttttttttttttttttttttttttttttttttttttttttttttttttttttttttttttttttttttttttttttttttttttttttttttttttttttttttttttttttttttttttttttttttttttttttttttttttttttttttttttttttttttttttttttttttttttttttttttttttttttttttttttttttttttttttttttttttttttttttttttttttttttttttttttttttttttttttttttttttttttttttttttttttttttttttttttttttttttttttttttttttttttttttttttttttttttttttttttttttttttttttttttttttttttttttttttttttttttttttttttttttttttttttttttttttttttttttttttttttttttttttttttttttttttttttttttttttttttttttttttttttttttttttttttttttttttttttttttttttttttttttttttttttttttttttttttttttttttttttttttttttttttttttttttttttttttttttttttttttttttttttttttttttttttttt

SEQ ID NO: 33 - DNA, 5000 bp, Artificial Sequence; identical to SEQ ID NO: 30
  source: /note="Description of Artificial Sequence: Synthetic polynucleotide"
  misc_feature (1)..(5000): /note="This sequence may encompass 100-5,000 nucleotides, wherein some positions may be absent"

SEQ ID NO: 34 - DNA, 400 bp, Artificial Sequence
  source: /note="Description of Artificial Sequence: Synthetic polynucleotide"
  misc_feature (1)..(400): /note="This sequence may encompass 100-400 nucleotides, wherein some positions may be absent"
  source: /note="See specification as filed for detailed description of substitutions and preferred embodiments"
aaaaaaaaaaaaaaaaaaaaaaaaaaaaaaaaaaaaaaaaaaaaaaaaaaaaaaaaaaaaaaaaaaaaaaaaaaaaaaaaaaaaaaaaaaaaaaaaaaaaaaaaaaaaaaaaaaaaaaaaaaaaaaaaaaaaaaaaaaaaaaaaaaaaaaaaaaaaaaaaaaaaaaaaaaaaaaaaaaaaaaaaaaaaaaaaaaaaaaaaaaaaaaaaaaaaaaaaaaaaaaaaaaaaaaaaaaaaaaaaaaaaaaaaaaaaaaaaaaaaaaaaaaaaaaaaaaaaaaaaaaaaaaaaaaaaaaaaaaaaaaaaaaaaaaaaaaaaaaaaaaaaaaaaaaaaaaaaaaaaaaaaaaaaaaaaaaaaaaaaaaaaaaaaaaaaaaaaaaaaaaaaaaaaaaaaaaaaaaaa

SEQ ID NO: 35 - DNA, 2000 bp, Artificial Sequence
  source: /note="Description of Artificial Sequence: Synthetic polynucleotide"
  misc_feature (1)..(2000): /note="This sequence may encompass 50-2,000 nucleotides, wherein some positions may be absent"
aaaaaaaaaaaaaaaaaaaaaaaaaaaaaaaaaaaaaaaaaaaaaaaaaaaaaaaaaaaaaaaaaaaaaaaaaaaaaaaaaaaaaaaaaaaaaaaaaaaaaaaaaaaaaaaaaaaaaaaaaaaaaaaaaaaaaaaaaaaaaaaaaaaaaaaaaaaaaaaaaaaaaaaaaaaaaaaaaaaaaaaaaaaaaaaaaaaaaaaaaaaaaaaaaaaaaaaaaaaaaaaaaaaaaaaaaaaaaaaaaaaaaaaaaaaaaaaaaaaaaaaaaaaaaaaaaaaaaaaaaaaaaaaaaaaaaaaaaaaaaaaaaaaaaaaaaaaaaaaaaaaaaaaaaaaaaaaaaaaaaaaaaaaaaaaaaaaaaaaaaaaaaaaaaaaaaaaaaaaaaaaaaaaaaaaaaaaaaaaaaaaaaaaaaaaaaaaaaaaaaaaaaaaaaaaaaaaaaaaaaaaaaaaaaaaaaaaaaaaaaaaaaaaaaaaaaaaaaaaaaaaaaaaaaaaaaaaaaaaaaaaaaaaaaaaaaaaaaaaaaaaaaaaaaaaaaaaaaaaaaaaaaaaaaaaaaaaaaaaaaaaaaaaaaaaaaaaaaaaaaaaaaaaaaaaaaaaaaaaaaaaaaaaaaaaaaaaaaaaaaaaaaaaaaaaaaaaaaaaaaaaaaaaaaaaaaaaaaaaaaaaaaaaaaaaaaaaaaaaaaaaaaaaaaaaaaaaaaaaaaaaaaaaaaaaaaaaaaaaaaaaaaaaaaaaaaaaaaaaaaaaaaaaaaaaaaaaaaaaaaaaaaaaaaaaaaaaaaaaaaaaaaaaaaaaaaaaaaaaaaaaaaaaaaaaaaaaaaaaaaaaaaaaaaaaaaaaaaaaaaaaaaaaaaaaaaaaaaaaaaaaaaaaaaaaaaaaaaaaaaaaaaaaaaaaaaaaaaaaaaaaaaaaaaaaaaaaaaaaaaaaaaaaaaaaaaaaaaaaaaaaaaaaaaaaaaaaaaaaaaaaaaaaaaaaaaaaaaaaaaaaaaaaaaaaaaaaaaaaaaaaaaaaaaaaaaaaaaaaaaaaaaaaaaaaaaaaaaaaaaaaaaaaaaaaaaaaaaaaaaaaaaaaaaaaaaaaaaaaaaaaaaaaaaaaaaaaaaaaaaaaaaaaaaaaaaaaaaaaaaaaaaaaaaaaaaaaaaaaaaaaaaaaaaaaaaaaaaaaaaaaaaaaaaaaaaaaaaaaaaaaaaaaaaaaaaaaaaaaaaaaaaaaaaaaaaaaaaaaaaaaaaaaaaaaaaaaaaaaaaaaaaaaaaaaaaaaaaaaaaaaaaaaaaaaaaaaaaaaaaaaaaaaaaaaaaaaaaaaaaaaaaaaaaaaaaaaaaaaaaaaaaaaaaaaaaaaaaaaaaaaaaaaaaaaaaaaaaaaaaaaaaaaaaaaaaaaaaaaaaaaaaaaaaaaaaaaaaaaaaaaaaaaaaaaaaaaaaaaaaaaaaaaaaaaaaaaaaaaaaaaaaaaaaaaaaaaaaaaaaaaaaaaaaaaaaaaaaaaaaaaaaaaaaaaaaaaaaaaaaaaaaaaaaaaaaaaaaaaaaaaaaaaaaaaaaaaaaaaaaaaaaaaaaaaaaaaaaaaaaaaaaaaaaaaaaaaaaaaaaaaaaaaaaaaaaaaaaaaaaaaaaaaaaaaaaaaaaaaaaaaaaaaaaaaaaaaaaaaaaaaaaaaaaaaaaaaaaaaaaaaaaaaaaaaaaaaaaaaaaaaaaaaaaaaaaaaaaaaaaaaaaaaaaaaaaaaaaaaaaaaaaaaaaaaaaaaaaaaaaaaaaaaaaaaaaaaaaaaaaaaaaaaaaaaaaaaaaaaaaaaaaaaaaaaaaaaaaaaaaaaaaaaaaaaaaaaaaaaaaaaaaaaaaaaaaaaaaaaaaaaaaaaaaaaaaaaaaaaaaaaaaaaaaaaaaaaaaaaaaaaaaaaaaaaaaaaaaaaaaaaaaaaaaaaaaaaaaaaaaaaaaaaaaaaaaaaaaaaaaaaaaaaaaaaaaaaaaaaaaaaaaaaaaaaaaaaaaaaaaaaaaaaaaaaaaaaaaaaa

SEQ ID NO: 36 - protein, 230 aa, Artificial Sequence; identical to SEQ ID NO: 3
  source: /note="Description of Artificial Sequence: Synthetic polypeptide"

SEQ ID NO: 37 - DNA, 690 bp, Artificial Sequence; identical to SEQ ID NO: 14
  source: /note="Description of Artificial Sequence: Synthetic polynucleotide"

SEQ ID NO: 38 - protein, 40 aa, Artificial Sequence
  source: /note="Description of Artificial Sequence: Synthetic polypeptide"
  misc_feature (1)..(40): /note="This sequence may encompass 1-10 'Gly Gly Gly Ser' repeating units, wherein some positions may be absent"
  source: /note="See specification as filed for detailed description of substitutions and preferred embodiments"
GGGSGGGSGGGSGGGSGGGSGGGSGGGSGGGSGGGSGGGS

SEQ ID NO: 39 - protein, 246 aa, Artificial Sequence
  source: /note="Description of Artificial Sequence: Synthetic polypeptide"
QVQLVESGGGLVQPGRSLRLSCAASGFTFSNYAMSWVRQAPGKGLGWVSGISRSGENTYYADSVKGRFTISRDNSKNTLYLQMNSLRDEDTAVYYCARSPAHYYGGMDVWGQGTTVTVSSASGGGGSGGRASGGGGSDIVLTQSPGTLSLSPGERATLSCRASQSISSSFLAWYQQKPGQAPRLLIYGASRRATGIPDRFSGSGSGTDFTLTISRLEPEDSAVYYCQQYHSSPSWTFGQGTKLEIK

SEQ ID NO: 40 - protein, 244 aa, Artificial Sequence
  source: /note="Description of Artificial Sequence: Synthetic polypeptide"
QVQLVESGGGLVQPGRSLRLSCAASGFTFDDYAMHWVRQAPGKGLEWVSGISWNSGSIGYADSVKGRFTISRDNAKNSLYLQMNSLRAEDTALYYCSVHSFLAYWGQGTLVTVSSASGGGGSGGRASGGGGSDIVMTQTPLSLPVTPGEPASISCRSSQSLLHSNGYNYLDWYLQKPGQSPQLLIYLGSNRASGVPDRFSGSGSGTDFTLKISRVEAEDVGVYYCMQALQTPYTFGQGTKVEIK

SEQ ID NO: 41 - protein, 243 aa, Artificial Sequence
  source: /note="Description of Artificial Sequence: Synthetic polypeptide"
EVQLLESGGGLVQPGGSLRLSCAVSGFALSNHGMSWVRRAPGKGLEWVSGIVYSGSTYYAASVKGRFTISRDNSRNTLYLQMNSLRPEDTAIYYCSAHGGESDVWGQGTTVTVSSASGGGGSGGRASGGGGSDIVMTQTPLSLSVTPGQPASISCKSSQSLLRNDGKTPLYWYLQKAGQPPQLLIYEVSNRFSGVPDRFSGSGSGTDFTLKISRVEAEDVGAYYCMQNIQFPSFGGGTKLEIK

SEQ ID NO: 42 - protein, 249 aa, Artificial Sequence
  source: /note="Description of Artificial Sequence: Synthetic polypeptide"
QVQLVQSGAEVRKTGASVKVSCKASGYIFDNFGINWVRQAPGQGLEWMGWINPKNNNTNYAQKFQGRVTITADESTNTAYMEVSSLRSEDTAVYYCARGPYYYQSYMDVWGQGTMVTVSSASGGGGSGGRASGGGGSDIVMTQTPLSLPVTPGEPASISCRSSQSLLHSNGYNYLNWYLQKPGQSPQLLIYLGSKRASGVPDRFSGSGSGTDFTLHITRVGAEDVGVYYCMQALQTPYTFGQGTKLEIK

SEQ ID NO: 43 - protein, 246 aa, Artificial Sequence
  source: /note="Description of Artificial Sequence: Synthetic polypeptide"
QVQLQESGGGLVQPGGSLRLSCAASGFTFSSDAMTWVRQAPGKGLEWVSVISGSGGTTYYADSVKGRFTISRDNSKNTLYLQMNSLRAEDTAVYYCAKLDSSGYYYARGPRYWGQGTLVTVSSASGGGGSGGRASGGGGSDIQLTQSPSSLSASVGDRVTITCRASQSISSYLNWYQQKPGKAPKLLIYGASTLASGVPARFSGSGSGTHFTLTINSLQSEDSATYYCQQSYKRASFGQGTKVEIK

SEQ ID NO: 44 - protein, 247 aa, Artificial Sequence
  source: /note="Description of Artificial Sequence: Synthetic polypeptide"
QVQLVQSGAEVKKPGASVKVSCKASGYTFSNYGITWVRQAPGQGLEWMGWISAYNGNTNYAQKFQGRVTMTRNTSISTAYMELSSLRSEDTAVYYCARGPYYYYMDVWGKGTMVTVSSASGGGGSGGRASGGGGSEIVMTQSPLSLPVTPGEPASISCRSSQSLLYSNGYNYVDWYLQKPGQSPQLLIYLGSNRASGVPDRFSGSGSGTDFKLQISRVEAEDVGIYYCMQGRQFPYSFGQGTKVEIK

SEQ ID NO: 45 - protein, 238 aa, Artificial Sequence
  source: /note="Description of Artificial Sequence: Synthetic polypeptide"
EVQLLETGGGLVQPGGSLRLSCAVSGFALSNHGMSWVRRAPGKGLEWVSGIVYSGSTYYAASVKGRFTISRDNSRNTLYLQMNSLRPEDTAIYYCSAHGGESDVWGQGTTVTVSSASGGGGSGGRASGGGGSEIVLTQSPATLSVSPGESATLSCRASQSVSSNLAWYQQKPGQAPRLLIYGASTRASGIPDRFSGSGSGTDFTLTISSLQAEDVAVYYCQQYGSSLTFGGGTKVEIK

SEQ ID NO: 46 - protein, 239 aa, Artificial Sequence
  source: /note="Description of Artificial Sequence: Synthetic polypeptide"
EVQLVETGGGLVQPGGSLRLSCAVSGFALSNHGMSWVRRAPGKGLEWVSGIVYSGSTYYAASVKGRFTISRDNSRNTLYLQMNSLRPEDTAIYYCSAHGGESDVWGQGTTVTVSSASGGGGSGGRASGGGGSEIVMTQSPATLSVSPGERATLSCRASQSVSSKLAWYQQKPGQAPRLLMYGASIRATGIPDRFSGSGSGTEFTLTISSLEPEDFAVYYCQQYGSSSWTFGQGTKVEIK

SEQ ID NO: 47 - protein, 241 aa, Artificial Sequence
  source: /note="Description of Artificial Sequence: Synthetic polypeptide"
EVQLVETGGGVVQPGGSLRLSCAVSGFALSNHGMSWVRRAPGKGLEWVSGIVYSGSTYYAASVKGRFTISRDNSRNTLYLQMNSLRPEDTAIYYCSAHGGESDVWGQGTTVTVSSASGGGGSGGRASGGGGSEIVLTQSPGTLSLSPGERATLSCRASQSVGSTNLAWYQQKPGQAPRLLIYDASNRATGIPDRFSGGGSGTDFTLTISRLEPEDFAVYYCQQYGSSPPWTFGQGTKVEIK

SEQ ID NO: 48 - protein, 239 aa, Artificial Sequence
  source: /note="Description of Artificial Sequence: Synthetic polypeptide"
QVQLVESGGGLVKPGGSLRLSCAASGFTFSDYYMSWIRQAPGKGLEWVSYISSSGSTIYYADSVKGRFTISRDNAKNSLYLQMNSLRAEDTAVYYCARESGDGMDVWGQGTTVTVSSASGGGGSGGRASGGGGSDIQMTQSPSSLSASVGDRVTITCRASQSISSYLNWYQQKPGKAPKLLIYAASSLQSGVPSRFSGSGSGTDFTLTISSLQPEDFATYYCQQSYTLAFGQGTKVDIK

SEQ ID NO: 49 - protein, 239 aa, Artificial Sequence
  source: /note="Description of Artificial Sequence: Synthetic polypeptide"
EVQLVESGGGLVQPGGSLRLSCAVSGFALSNHGMSWVRRAPGKGLEWVSGIVYSGSTYYAASVKGRFTISRDNSRNTLYLQMNSLRPEDTAIYYCSAHGGESDVWGQGTTVTVSSASGGGGSGGRASGGGGSDIQLTQSPSSLSASVGDRVTITCRASQSISSYLNWYQQKPGKAPKLLIYAASSLQSGVPSRFSGSGSGTDFTLTISSLQPEDFATYYCQQSYSTPYTFGQGTKVEIK

SEQ ID NO: 50 - protein, 246 aa, Artificial Sequence
  source: /note="Description of Artificial Sequence: Synthetic polypeptide"
QVQLVQSGGGLVKPGGSLRLSCAASGFTFSDYYMSWIRQAPGKGLEWVSYISSSGNTIYYADSVKGRFTISRDNAKNSLYLQMNSLRAEDTAVYYCARSTMVREDYWGQGTLVTVSSASGGGGSGGRASGGGGSDIVLTQSPLSLPVTLGQPASISCKSSESLVHNSGKTYLNWFHQRPGQSPRRLIYEVSNRDSGVPDRFTGSGSGTDFTLKISRVEAEDVGVYYCMQGTHWPGTFGQGTKLEIK

SEQ ID NO: 51 - protein, 239 aa, Artificial Sequence
  source: /note="Description of Artificial Sequence: Synthetic polypeptide"
QVQLVESGGGLVQPGGSLRLSCAVSGFALSNHGMSWVRRAPGKGLEWVSGIVYSGSTYYAASVKGRFTISRDNSRNTLYLQMNSLRPEDTAIYYCSAHGGESDVWGQGTTVTVSSASGGGGSGGRASGGGGSDIRLTQSPSPLSASVGDRVTITCQASEDINKFLNWYHQTPGKAPKLLIYDASTLQTGVPSRFSGSGSGTDFTLTINSLQPEDIGTYYCQQYESLPLTFGGGTKVEIK

SEQ ID NO: 52 - protein, 240 aa, Artificial Sequence
  source: /note="Description of Artificial Sequence: Synthetic polypeptide"
EVQLVETGGGLVQPGGSLRLSCAVSGFALSNHGMSWVRRAPGKGLEWVSGIVYSGSTYYAASVKGRFTISRDNSRNTLYLQMNSLRPEDTAIYYCSAHGGESDVWGQGTTVTVSSASGGGGSGGRASGGGGSETTLTQSPATLSVSPGERATLSCRASQSVGSNLAWYQQKPGQGPRLLIYGASTRATGIPARFSGSGSGTEFTLTISSLQPEDFAVYYCQQYNDWLPVTFGQGTKVEIK

SEQ ID NO: 53 - protein, 241 aa, Artificial Sequence
  source: /note="Description of Artificial Sequence: Synthetic polypeptide"
EVQLVESGGGLVQPGGSLRLSCAVSGFALSNHGMSWVRRAPGKGLEWVSGIVYSGSTYYAASVKGRFTISRDNSRNTLYLQMNSLRPEDTAIYYCSAHGGESDVWGQGTTVTVSSASGGGGSGGRASGGGGSEIVLTQSPGTLSLSPGERATLSCRASQSIGSSSLAWYQQKPGQAPRLLMYGASSRASGIPDRFSGSGSGTDFTLTISRLEPEDFAVYYCQQYAGSPPFTFGQGTKVEIK

SEQ ID NO: 54 - DNA, 738 bp, Artificial Sequence
  source: /note="Description of Artificial Sequence: Synthetic polynucleotide"
caagtgcaactcgtggaatctggtggaggactcgtgcaacccggaagatcgcttagactgtcgtgtgccgccagcgggttcactttctcgaactacgcgatgtcctgggtccgccaggcacccggaaagggactcggttgggtgtccggcatttcccggtccggcgaaaatacctactacgccgactccgtgaagggccgcttcaccatctcaagggacaacagcaaaaacaccctgtacttgcaaatgaactccctgcgggatgaagatacagccgtgtactattgcgcccggtcgcctgcccattactacggcggaatggacgtctggggacagggaaccactgtgactgtcagcagcgcgtcgggtggcggcggctcagggggtcgggcctccggggggggagggtccgacatcgtgctgacccagtccccgggaaccctgagcctgagcccgggagagcgcgcgaccctgtcatgccgggcatcccagagcattagctcctcctttctcgcctggtatcagcagaagcccggacaggccccgaggctgctgatctacggcgctagcagaagggctaccggaatcccagaccggttctccggctccggttccgggaccgatttcacccttactatctcgcgcctggaacctgaggactccgccgtctactactgccagcagtaccactcatccccgtcgtggacgttcggacagggcaccaagctggagattaag

SEQ ID NO: 55 - DNA, 732 bp, Artificial Sequence
  source: /note="Description of Artificial Sequence: Synthetic polynucleotide"
caagtgcaactcgtcgaatccggtggaggtctggtccaacctggtagaagcctgagactgtcgtgtgcggccagcggattcacctttgatgactatgctatgcactgggtgcggcaggccccaggaaagggcctggaatgggtgtcgggaattagctggaactccgggtccattggctacgccgactccgtgaagggccgcttcaccatctcccgcgacaacgcaaagaactccctgtacttgcaaatgaactcgctcagggctgaggataccgcgctgtactactgctccgtgcattccttcctggcctactggggacagggaactctggtcaccgtgtcgagcgcctccggcggcgggggctcgggtggacgggcctcgggcggaggggggtccgacatcgtgatgacccagaccccgctgagcttgcccgtgactcccggagagcctgcatccatctcctgccggtcatcccagtcccttctccactccaacggatacaactacctcgactggtacctccagaagccgggacagagccctcagcttctgatctacctggggtcaaatagagcctcaggagtgccggatcggttcagcggatctggttcgggaactgatttcactctgaagatttcccgcgtggaagccgaggacgtgggcgtctactactgtatgcaggcgctgcagaccccctataccttcggccaagggacgaaagtggagatcaag

SEQ ID NO: 56 - DNA, 729 bp, Artificial Sequence
  source: /note="Description of Artificial Sequence: Synthetic polynucleotide"
gaagtgcaattgttggaatctggaggaggacttgtgcagcctggaggatcactgagactttcgtgtgcggtgtcaggcttcgccctgagcaaccacggcatgagctgggtgcggagagccccggggaagggtctggaatgggtgtccgggatcgtctactccggttcaacttactacgccgcaagcgtgaagggtcgcttcaccatttcccgcgataactcccggaacaccctgtacctccaaatgaactccctgcggcccgaggacaccgccatctactactgttccgcgcatggaggagagtccgatgtctggggacagggcactaccgtgaccgtgtcgagcgcctcggggggaggaggctccggcggtcgcgcctccggggggggtggcagcgacattgtgatgacgcagactccactctcgctgtccgtgaccccgggacagcccgcgtccatctcgtgcaagagctcccagagcctgctgaggaacgacggaaagactcctctgtattggtacctccagaaggctggacagcccccgcaactgctcatctacgaagtgtcaaatcgcttctccggggtgccggatcggttttccggctcgggatcgggcaccgacttcaccctgaaaatctccagggtcgaggccgaggacgtgggagcctactactgcatgcaaaacatccagttcccttccttcggcggcggcacaaagctggagattaag

SEQ ID NO: 57 - DNA, 747 bp, Artificial Sequence
  source: /note="Description of Artificial Sequence: Synthetic polynucleotide"
caagtccaactcgtccagtccggcgcagaagtcagaaaaaccggtgctagcgtgaaagtgtcctgcaaggcctccggctacattttcgataacttcggaatcaactgggtcagacaggccccgggccaggggctggaatggatgggatggatcaaccccaagaacaacaacaccaactacgcacagaagttccagggccgcgtgactatcaccgccgatgaatcgaccaataccgcctacatggaggtgtcctccctgcggtcggaggacactgccgtgtattactgcgcgaggggcccatactactaccaaagctacatggacgtctggggacagggaaccatggtgaccgtgtcatccgcctccggtggtggaggctccggggggcgggcttcaggaggcggaggaagcgatattgtgatgacccagactccgcttagcctgcccgtgactcctggagaaccggcctccatttcctgccggtcctcgcaatcactcctgcattccaacggttacaactacctgaattggtacctccagaagcctggccagtcgccccagttgctgatctatctgggctcgaagcgcgcctccggggtgcctgaccggtttagcggatctgggagcggcacggacttcactctccacatcacccgcgtgggagcggaggacgtgggagtgtactactgtatgcaggcgctgcagactccgtacacattcggacagggcaccaagctggagatcaag

SEQ ID NO: 58 - DNA, 738 bp, Artificial Sequence
  source: /note="Description of Artificial Sequence: Synthetic polynucleotide"
caagtgcaacttcaagaatcaggcggaggactcgtgcagcccggaggatcattgcggctctcgtgcgccgcctcgggcttcaccttctcgagcgacgccatgacctgggtccgccaggccccggggaaggggctggaatgggtgtctgtgatttccggctccgggggaactacgtactacgccgattccgtgaaaggtcgcttcactatctcccgggacaacagcaagaacaccctttatctgcaaatgaattccctccgcgccgaggacaccgccgtgtactactgcgccaagctggactcctcgggctactactatgcccggggtccgagatactggggacagggaaccctcgtgaccgtgtcctccgcgtccggcggaggagggtcgggagggcgggcctccggcggcggcggttcggacatccagctgacccagtccccatcctcactgagcgcaagcgtgggcgacagagtcaccattacatgcagggcgtcccagagcatcagctcctacctgaactggtaccaacagaagcctggaaaggctcctaagctgttgatctacggggcttcgaccctggcatccggggtgcccgcgaggtttagcggaagcggtagcggcactcacttcactctgaccattaacagcctccagtccgaggattcagccacttactactgtcagcagtcctacaagcgggccagcttcggacagggcactaaggtcgagatcaag

SEQ ID NO: 59 - DNA, 741 bp, Artificial Sequence
  source: /note="Description of Artificial Sequence: Synthetic polynucleotide"
caagtccaactggtccagagcggtgcagaagtgaagaagcccggagcgagcgtgaaagtgtcctgcaaggcttccgggtacaccttctccaactacggcatcacttgggtgcgccaggccccgggacagggcctggaatggatggggtggatttccgcgtacaacggcaatacgaactacgctcagaagttccagggtagagtgaccatgactaggaacacctccatttccaccgcctacatggaactgtcctccctgcggagcgaggacaccgccgtgtactattgcgcccggggaccatactactactacatggatgtctgggggaaggggactatggtcaccgtgtcatccgcctcgggaggcggcggatcaggaggacgcgcctctggtggtggaggatcggagatcgtgatgacccagagccctctctccttgcccgtgactcctggggagcccgcatccatttcatgccggagctcccagtcacttctctactccaacggctataactacgtggattggtacctccaaaagccgggccagagcccgcagctgctgatctacctgggctcgaacagggccagcggagtgcctgaccggttctccgggtcgggaagcgggaccgacttcaagctgcaaatctcgagagtggaggccgaggacgtgggaatctactactgtatgcagggccgccagtttccgtactcgttcggacagggcaccaaagtggaaatcaag

SEQ ID NO: 60 - DNA, 714 bp, Artificial Sequence
  source: /note="Description of Artificial Sequence: Synthetic polynucleotide"
gaagtgcaattgctcgaaactggaggaggtctggtgcaacctggaggatcacttcgcctgtcctgcgccgtgtcgggctttgccctgtccaaccatggaatgagctgggtccgccgcgcgccggggaagggcctcgaatgggtgtccggcatcgtctactccggctccacctactacgccgcgtccgtgaagggccggttcacgatttcacgggacaactcgcggaacaccctgtacctccaaatgaattcccttcggccggaggatactgccatctactactgctccgcccacggtggcgaatccgacgtctggggccagggaaccaccgtgaccgtgtccagcgcgtccgggggaggaggaagcgggggtagagcatcgggtggaggcggatcagagatcgtgctgacccagtcccccgccaccttgagcgtgtcaccaggagagtccgccaccctgtcatgccgcgccagccagtccgtgtcctccaacctggcttggtaccagcagaagccggggcaggcccctagactcctgatctatggggcgtcgacccgggcatctggaattcccgataggttcagcggatcgggctcgggcactgacttcactctgaccatctcctcgctgcaagccgaggacgtggctgtgtactactgtcagcagtacggaagctccctgactttcggtggcgggaccaaagtcgagattaag

SEQ ID NO: 61 - DNA, 717 bp, Artificial Sequence
  source: /note="Description of Artificial Sequence: Synthetic polynucleotide"
gaagtgcaattggtggaaactggaggaggacttgtgcaacctggaggatcattgagactgagctgcgcagtgtcgggattcgccctgagcaaccatggaatgtcctgggtcagaagggcccctggaaaaggcctcgaatgggtgtcagggatcgtgtactccggttccacttactacgccgcctccgtgaaggggcgcttcactatctcacgggataactcccgcaataccctgtacctccaaatgaacagcctgcggccggaggataccgccatctactactgttccgcccacggtggagagtctgacgtctggggccagggaactaccgtgaccgtgtcctccgcgtccggcggtggagggagcggcggccgcgccagcggcggcggaggctccgagatcgtgatgacccagagccccgctactctgtcggtgtcgcccggagaaagggcgaccctgtcctgccgggcgtcgcagtccgtgagcagcaagctggcttggtaccagcagaagccgggccaggcaccacgcctgcttatgtacggtgcctccattcgggccaccggaatcccggaccggttctcggggtcggggtccggtaccgagttcacactgaccatttcctcgctcgagcccgaggactttgccgtctattactgccagcagtacggctcctcctcatggacgttcggccaggggaccaaggtcgaaatcaag

SEQ ID NO: 62 - DNA, 723 bp, Artificial Sequence
  source: /note="Description of Artificial Sequence: Synthetic polynucleotide"
gaagtgcaattggtggagactggaggaggagtggtgcaacctggaggaagcctgagactgtcatgcgcggtgtcgggcttcgccctctccaaccacggaatgtcctgggtccgccgggcccctgggaaaggacttgaatgggtgtccggcatcgtgtactcgggttccacctactacgcggcctcagtgaagggccggtttactattagccgcgacaactccagaaacacactgtacctccaaatgaactcgctgcggccggaagataccgctatctactactgctccgcccatgggggagagtcggacgtctggggacagggcaccactgtcactgtgtccagcgcttccggcggtggtggaagcgggggacgggcctcaggaggcggtggcagcgagattgtgctgacccagtcccccgggaccctgagcctgtccccgggagaaagggccaccctctcctgtcgggcatcccagtccgtggggtctactaaccttgcatggtaccagcagaagcccggccaggcccctcgcctgctgatctacgacgcgtccaatagagccaccggcatcccggatcgcttcagcggaggcggatcgggcaccgacttcaccctcaccatttcaaggctggaaccggaggacttcgccgtgtactactgccagcagtatggttcgtccccaccctggacgttcggccaggggactaaggtcgagatcaag

SEQ ID NO: 63 - DNA, 717 bp, Artificial Sequence
  source: /note="Description of Artificial Sequence: Synthetic polynucleotide"
caagtgcaactcgtggaatctggtggaggactcgtgaaacctggaggatcattgagactgtcatgcgcggcctcgggattcacgttctccgattactacatgagctggattcgccaggctccggggaagggactggaatgggtgtcctacatttcctcatccggctccaccatctactacgcggactccgtgaaggggagattcaccattagccgcgataacgccaagaacagcctgtaccttcagatgaactccctgcgggctgaagatactgccgtctactactgcgcaagggagagcggagatgggatggacgtctggggacagggtaccactgtgaccgtgtcgtcggcctccggcggagggggttcgggtggaagggccagcggcggcggaggcagcgacatccagatgacccagtccccctcatcgctgtccgcctccgtgggcgaccgcgtcaccatcacatgccgggcctcacagtcgatctcctcctacctcaattggtatcagcagaagcccggaaaggcccctaagcttctgatctacgcagcgtcctccctgcaatccggggtcccatctcggttctccggctcgggcagcggtaccgacttcactctgaccatctcgagcctgcagccggaggacttcgccacttactactgtcagcaaagctacaccctcgcgtttggccagggcaccaaagtggacatcaag

SEQ ID NO: 64 - DNA, 717 bp, Artificial Sequence
  source: /note="Description of Artificial Sequence: Synthetic polynucleotide"
gaagtgcaattggtggaatcagggggaggacttgtgcagcctggaggatcgctgagactgtcatgtgccgtgtccggctttgccctgtccaaccacgggatgtcctgggtccgccgcgcgcctggaaagggcctcgaatgggtgtcgggtattgtgtacagcggtagcacctactatgccgcatccgtgaaggggagattcaccatcagccgggacaactccaggaacactctgtacctccaaatgaattcgctgaggccagaggacactgccatctactactgctccgcgcatggcggagagtccgacgtctggggacaggggaccaccgtgaccgtgtctagcgcgtccggcggaggcggcagcgggggtcgggcatcagggggcggcggatcggacatccagctcacccagtccccgagctcgctgtccgcctccgtgggagatcgggtcaccatcacgtgccgcgccagccagtcgatttcctcctacctgaactggtaccaacagaagcccggaaaagccccgaagcttctcatctacgccgcctcgagcctgcagtcaggagtgccctcacggttctccggctccggttccggtactgatttcaccctgaccatttcctccctgcaaccggaggacttcgctacttactactgccagcagtcgtactccaccccctacactttcggacaaggcaccaaggtcgaaatcaag

SEQ ID NO: 65 - DNA, 738 bp, Artificial Sequence
  source: /note="Description of Artificial Sequence: Synthetic polynucleotide"
caagtgcaactggtgcaaagcggaggaggattggtcaaacccggaggaagcctgagactgtcatgcgcggcctctggattcaccttctccgattactacatgtcatggatcagacaggccccggggaagggcctcgaatgggtgtcctacatctcgtcctccgggaacaccatctactacgccgacagcgtgaagggccgctttaccatttcccgcgacaacgcaaagaactcgctgtaccttcagatgaattccctgcgggctgaagataccgcggtgtactattgcgcccggtccactatggtccgggaggactactggggacagggcacactcgtgaccgtgtccagcgcgagcgggggtggaggcagcggtggacgcgcctccggcggcggcggttcagacatcgtgctgactcagtcgcccctgtcgctgccggtcaccctgggccaaccggcctcaattagctgcaagtcctcggagagcctggtgcacaactcaggaaagacttacctgaactggttccatcagcggcctggacagtccccacggaggctcatctatgaagtgtccaacagggattcgggggtgcccgaccgcttcactggctccgggtccggcaccgacttcaccttgaaaatctccagagtggaagccgaggacgtgggcgtgtactactgtatgcagggtacccactggcctggaacctttggacaaggaactaagctcgagattaag

SEQ ID NO: 66 - DNA, 717 bp, Artificial Sequence
  source: /note="Description of Artificial Sequence: Synthetic polynucleotide"
caagtgcaactcgtggaatctggtggaggactcgtgcaacccggtggaagccttaggctgtcgtgcgccgtcagcgggtttgctctgagcaaccatggaatgtcctgggtccgccgggcaccgggaaaagggctggaatgggtgtccggcatcgtgtacagcgggtcaacctattacgccgcgtccgtgaagggcagattcactatctcaagagacaacagccggaacaccctgtacttgcaaatgaattccctgcgccccgaggacaccgccatctactactgctccgcccacggaggagagtcggacgtgtggggccagggaacgactgtgactgtgtccagcgcatcaggagggggtggttcgggcggccgggcctcggggggaggaggttccgacattcggctgacccagtccccgtccccactgtcggcctccgtcggcgaccgcgtgaccatcacttgtcaggcgtccgaggacattaacaagttcctgaactggtaccaccagacccctggaaaggcccccaagctgctgatctacgatgcctcgacccttcaaactggagtgcctagccggttctccgggtccggctccggcactgatttcactctgaccatcaactcattgcagccggaagatatcgggacctactattgccagcagtacgaatccctcccgctcacattcggcgggggaaccaaggtcgagattaag

SEQ ID NO: 67 - DNA, 720 bp, Artificial Sequence
  source: /note="Description of Artificial Sequence: Synthetic polynucleotide"
gaagtgcaattggtggaaactggaggaggacttgtgcaacctggaggatcattgcggctctcatgcgctgtctccggcttcgccctgtcaaatcacgggatgtcgtgggtcagacgggccccgggaaagggtctggaatgggtgtcggggattgtgtacagcggctccacctactacgccgcttcggtcaagggccgcttcactatttcacgggacaacagccgcaacaccctctatctgcaaatgaactctctccgcccggaggataccgccatctactactgctccgcacacggcggcgaatccgacgtgtggggacagggaaccactgtcaccgtgtcgtccgcatccggtggcggaggatcgggtggccgggcctccgggggcggcggcagcgagactaccctgacccagtcccctgccactctgtccgtgagcccgggagagagagccacccttagctgccgggccagccagagcgtgggctccaacctggcctggtaccagcagaagccaggacagggtcccaggctgctgatctacggagcctccactcgcgcgaccggcatccccgcgaggttctccgggtcgggttccgggaccgagttcaccctgaccatctcctccctccaaccggaggacttcgcggtgtactactgtcagcagtacaacgattggctgcccgtgacatttggacaggggacgaaggtggaaatcaaa

SEQ ID NO: 68 - DNA, 723 bp, Artificial Sequence
  source: /note="Description of Artificial Sequence: Synthetic polynucleotide"
gaagtgcaattggtggaatctggtggaggacttgtgcaacctggaggatcactgagactgtcatgcgcggtgtccggttttgccctgagcaatcatgggatgtcgtgggtccggcgcgcccccggaaagggtctggaatgggtgtcgggtatcgtctactccgggagcacttactacgccgcgagcgtgaagggccgcttcaccatttcccgcgataactcccgcaacaccctgtacttgcaaatgaactcgctccggcctgaggacactgccatctactactgctccgcacacggaggagaatccgacgtgtggggccagggaactaccgtgaccgtcagcagcgcctccggcggcgggggctcaggcggacgggctagcggcggcggtggctccgagatcgtgctgacccagtcgcctggcactctctcgctgagccccggggaaagggcaaccctgtcctgtcgggccagccagtccattggatcatcctccctcgcctggtatcagcagaaaccgggacaggctccgcggctgcttatgtatggggccagctcaagagcctccggcattcccgaccggttctccgggtccggttccggcaccgatttcaccctgactatctcgaggctggagccagaggacttcgccgtgtactactgccagcagtacgcggggtccccgccgttcacgttcggacagggaaccaaggtcgagatcaag

SEQ ID NO: 69 - protein, 120 aa, Artificial Sequence
  source: /note="Description of Artificial Sequence: Synthetic polypeptide"
QVQLVESGGGLVQPGRSLRLSCAASGFTFSNYAMSWVRQAPGKGLGWVSGISRSGENTYYADSVKGRFTISRDNSKNTLYLQMNSLRDEDTAVYYCARSPAHYYGGMDVWGQGTTVTVSS

SEQ ID NO: 70 - protein, 115 aa, Artificial Sequence
  source: /note="Description of Artificial Sequence: Synthetic polypeptide"
QVQLVESGGGLVQPGRSLRLSCAASGFTFDDYAMHWVRQAPGKGLEWVSGISWNSGSIGYADSVKGRFTISRDNAKNSLYLQMNSLRAEDTALYYCSVHSFLAYWGQGTLVTVSS

SEQ ID NO: 71 - protein, 115 aa, Artificial Sequence
  source: /note="Description of Artificial Sequence: Synthetic polypeptide"
EVQLLESGGGLVQPGGSLRLSCAVSGFALSNHGMSWVRRAPGKGLEWVSGIVYSGSTYYAASVKGRFTISRDNSRNTLYLQMNSLRPEDTAIYYCSAHGGESDVWGQGTTVTVSS

SEQ ID NO: 72 - protein, 120 aa, Artificial Sequence
  source: /note="Description of Artificial Sequence: Synthetic polypeptide"
QVQLVQSGAEVRKTGASVKVSCKASGYIFDNFGINWVRQAPGQGLEWMGWINPKNNNTNYAQKFQGRVTITADESTNTAYMEVSSLRSEDTAVYYCARGPYYYQSYMDVWGQGTMVTVSS

SEQ ID NO: 73 - protein, 123 aa, Artificial Sequence
  source: /note="Description of Artificial Sequence: Synthetic polypeptide"
QVQLQESGGGLVQPGGSLRLSCAASGFTFSSDAMTWVRQAPGKGLEWVSVISGSGGTTYYADSVKGRFTISRDNSKNTLYLQMNSLRAEDTAVYYCAKLDSSGYYYARGPRYWGQGTLVTVSS

SEQ ID NO: 74 - protein, 118 aa, Artificial Sequence
  source: /note="Description of Artificial Sequence: Synthetic polypeptide"
QVQLVQSGAEVKKPGASVKVSCKASGYTFSNYGITWVRQAPGQGLEWMGWISAYNGNTNYAQKFQGRVTMTRNTSISTAYMELSSLRSEDTAVYYCARGPYYYYMDVWGKGTMVTVSS

SEQ ID NO: 75 - protein, 115 aa, Artificial Sequence
  source: /note="Description of Artificial Sequence: Synthetic polypeptide"
EVQLLETGGGLVQPGGSLRLSCAVSGFALSNHGMSWVRRAPGKGLEWVSGIVYSGSTYYAASVKGRFTISRDNSRNTLYLQMNSLRPEDTAIYYCSAHGGESDVWGQGTTVTVSS

SEQ ID NO: 76 - protein, 115 aa, Artificial Sequence
  source: /note="Description of Artificial Sequence: Synthetic polypeptide"
EVQLVETGGGLVQPGGSLRLSCAVSGFALSNHGMSWVRRAPGKGLEWVSGIVYSGSTYYAASVKGRFTISRDNSRNTLYLQMNSLRPEDTAIYYCSAHGGESDVWGQGTTVTVSS

SEQ ID NO: 77 - protein, 115 aa, Artificial Sequence
  source: /note="Description of Artificial Sequence: Synthetic polypeptide"
EVQLVETGGGVVQPGGSLRLSCAVSGFALSNHGMSWVRRAPGKGLEWVSGIVYSGSTYYAASVKGRFTISRDNSRNTLYLQMNSLRPEDTAIYYCSAHGGESDVWGQGTTVTVSS

SEQ ID NO: 78 - protein, 117 aa, Artificial Sequence
  source: /note="Description of Artificial Sequence: Synthetic polypeptide"
QVQLVESGGGLVKPGGSLRLSCAASGFTFSDYYMSWIRQAPGKGLEWVSYISSSGSTIYYADSVKGRFTISRDNAKNSLYLQMNSLRAEDTAVYYCARESGDGMDVWGQGTTVTVSS

SEQ ID NO: 79 - protein, 115 aa, Artificial Sequence
  source: /note="Description of Artificial Sequence: Synthetic polypeptide"
EVQLVESGGGLVQPGGSLRLSCAVSGFALSNHGMSWVRRAPGKGLEWVSGIVYSGSTYYAASVKGRFTISRDNSRNTLYLQMNSLRPEDTAIYYCSAHGGESDVWGQGTTVTVSS

SEQ ID NO: 80 - protein, 117 aa, Artificial Sequence
  source: /note="Description of Artificial Sequence: Synthetic polypeptide"
QVQLVQSGGGLVKPGGSLRLSCAASGFTFSDYYMSWIRQAPGKGLEWVSYISSSGNTIYYADSVKGRFTISRDNAKNSLYLQMNSLRAEDTAVYYCARSTMVREDYWGQGTLVTVSS

SEQ ID NO: 81 - protein, 115 aa, Artificial Sequence
  source: /note="Description of Artificial Sequence: Synthetic polypeptide"
QVQLVESGGGLVQPGGSLRLSCAVSGFALSNHGMSWVRRAPGKGLEWVSGIVYSGSTYYAASVKGRFTISRDNSRNTLYLQMNSLRPEDTAIYYCSAHGGESDVWGQGTTVTVSS

SEQ ID NO: 82 - protein, 115 aa, Artificial Sequence; identical to SEQ ID NO: 76
  source: /note="Description of Artificial Sequence: Synthetic polypeptide"

SEQ ID NO: 83 - protein, 115 aa, Artificial Sequence; identical to SEQ ID NO: 79
  source: /note="Description of Artificial Sequence: Synthetic polypeptide"

SEQ ID NO: 84 - protein, 109 aa, Artificial Sequence
  source: /note="Description of Artificial Sequence: Synthetic polypeptide"
DIVLTQSPGTLSLSPGERATLSCRASQSISSSFLAWYQQKPGQAPRLLIYGASRRATGIPDRFSGSGSGTDFTLTISRLEPEDSAVYYCQQYHSSPSWTFGQGTKLEIK

SEQ ID NO: 85 - protein, 112 aa, Artificial Sequence
  source: /note="Description of Artificial Sequence: Synthetic polypeptide"
DIVMTQTPLSLPVTPGEPASISCRSSQSLLHSNGYNYLDWYLQKPGQSPQLLIYLGSNRASGVPDRFSGSGSGTDFTLKISRVEAEDVGVYYCMQALQTPYTFGQGTKVEIK

SEQ ID NO: 86 - protein, 111 aa, Artificial Sequence
  source: /note="Description of Artificial Sequence: Synthetic polypeptide"
DIVMTQTPLSLSVTPGQPASISCKSSQSLLRNDGKTPLYWYLQKAGQPPQLLIYEVSNRFSGVPDRFSGSGSGTDFTLKISRVEAEDVGAYYCMQNIQFPSFGGGTKLEIK

SEQ ID NO: 87 - protein, 112 aa, Artificial Sequence
  source: /note="Description of Artificial Sequence: Synthetic polypeptide"
DIVMTQTPLSLPVTPGEPASISCRSSQSLLHSNGYNYLNWYLQKPGQSPQLLIYLGSKRASGVPDRFSGSGSGTDFTLHITRVGAEDVGVYYCMQALQTPYTFGQGTKLEIK

SEQ ID NO: 88 - protein, 106 aa, Artificial Sequence
  source: /note="Description of Artificial Sequence: Synthetic polypeptide"
DIQLTQSPSSLSASVGDRVTITCRASQSISSYLNWYQQKPGKAPKLLIYGASTLASGVPARFSGSGSGTHFTLTINSLQSEDSATYYCQQSYKRASFGQGTKVEIK

SEQ ID NO: 89 - protein, 112 aa, Artificial Sequence
  source: /note="Description of Artificial Sequence: Synthetic polypeptide"
EIVMTQSPLSLPVTPGEPASISCRSSQSLLYSNGYNYVDWYLQKPGQSPQLLIYLGSNRASGVPDRFSGSGSGTDFKLQISRVEAEDVGIYYCMQGRQFPYSFGQGTKVEIK

SEQ ID NO: 90 - protein, 106 aa, Artificial Sequence
  source: /note="Description of Artificial Sequence: Synthetic polypeptide"
EIVLTQSPATLSVSPGESATLSCRASQSVSSNLAWYQQKPGQAPRLLIYGASTRASGIPDRFSGSGSGTDFTLTISSLQAEDVAVYYCQQYGSSLTFGGGTKVEIK

SEQ ID NO: 91 - protein, 107 aa, Artificial Sequence
  source: /note="Description of Artificial Sequence: Synthetic polypeptide"
EIVMTQSPATLSVSPGERATLSCRASQSVSSKLAWYQQKPGQAPRLLMYGASIRATGIPDRFSGSGSGTEFTLTISSLEPEDFAVYYCQQYGSSSWTFGQGTKVEIK

SEQ ID NO: 92 - protein, 109 aa, Artificial Sequence
  source: /note="Description of Artificial Sequence: Synthetic polypeptide"
EIVLTQSPGTLSLSPGERATLSCRASQSVGSTNLAWYQQKPGQAPRLLIYDASNRATGIPDRFSGGGSGTDFTLTISRLEPEDFAVYYCQQYGSSPPWTFGQGTKVEIK

SEQ ID NO: 93 - protein, 105 aa, Artificial Sequence
  source: /note="Description of Artificial Sequence: Synthetic polypeptide"
DIQMTQSPSSLSASVGDRVTITCRASQSISSYLNWYQQKPGKAPKLLIYAASSLQSGVPSRFSGSGSGTDFTLTISSLQPEDFATYYCQQSYTLAFGQGTKVDIK

SEQ ID NO: 94 - protein, 107 aa, Artificial Sequence
  source: /note="Description of Artificial Sequence: Synthetic polypeptide"
DIQLTQSPSSLSASVGDRVTITCRASQSISSYLNWYQQKPGKAPKLLIYAASSLQSGVPSRFSGSGSGTDFTLTISSLQPEDFATYYCQQSYSTPYTFGQGTKVEIK

SEQ ID NO: 95 - protein, 112 aa, Artificial Sequence
  source: /note="Description of Artificial Sequence: Synthetic polypeptide"
DIVLTQSPLSLPVTLGQPASISCKSSESLVHNSGKTYLNWFHQRPGQSPRRLIYEVSNRDSGVPDRFTGSGSGTDFTLKISRVEAEDVGVYYCMQGTHWPGTFGQGTKLEIK

SEQ ID NO: 96 - protein, 107 aa, Artificial Sequence
  source: /note="Description of Artificial Sequence: Synthetic polypeptide"
DIRLTQSPSPLSASVGDRVTITCQASEDINKFLNWYHQTPGKAPKLLIYDASTLQTGVPSRFSGSGSGTDFTLTINSLQPEDIGTYYCQQYESLPLTFGGGTKVEIK

SEQ ID NO: 97 - protein, 108 aa, Artificial Sequence
  source: /note="Description of Artificial Sequence: Synthetic polypeptide"
ETTLTQSPATLSVSPGERATLSCRASQSVGSNLAWYQQKPGQGPRLLIYGASTRATGIPARFSGSGSGTEFTLTISSLQPEDFAVYYCQQYNDWLPVTFGQGTKVEIK

SEQ ID NO: 98 - protein, 109 aa, Artificial Sequence
  source: /note="Description of Artificial Sequence: Synthetic polypeptide"
EIVLTQSPGTLSLSPGERATLSCRASQSIGSSSLAWYQQKPGQAPRLLMYGASSRASGIPDRFSGSGSGTDFTLTISRLEPEDFAVYYCQQYAGSPPFTFGQGTKVEIK

SEQ ID NO: 99 - protein, 490 aa, Artificial Sequence
  source: /note="Description of Artificial Sequence: Synthetic polypeptide"
MALPVTALLLPLALLLHAARPQVQLVESGGGLVQPGRSLRLSCAASGFTFSNYAMSWVRQAPGKGLGWVSGISRSGENTYYADSVKGRFTISRDNSKNTLYLQMNSLRDEDTAVYYCARSPAHYYGGMDVWGQGTTVTVSSASGGGGSGGRASGGGGSDIVLTQSPGTLSLSPGERATLSCRASQSISSSFLAWYQQKPGQAPRLLIYGASRRATGIPDRFSGSGSGTDFTLTISRLEPEDSAVYYCQQYHSSPSWTFGQGTKLEIKTTTPAPRPPTPAPTIASQPLSLRPEACRPAAGGAVHTRGLDFACDIYIWAPLAGTCGVLLLSLVITLYCKRGRKKLLYIFKQPFMRPVQTTQEEDGCSCRFPEEEEGGCELRVKFSRSADAPAYKQGQNQLYNELNLGRREEYDVLDKRRGRDPEMGGKPRRKNPQEGLYNELQKDKMAEAYSEIGMKGERRRGKGHDGLYQGLSTATKDTYDALHMQALPPR

SEQ ID NO: 100 - protein, 488 aa, Artificial Sequence
  source: /note="Description of Artificial Sequence: Synthetic polypeptide"
MALPVTALLLPLALLLHAARPQVQLVESGGGLVQPGRSLRLSCAASGFTFDDYAMHWVRQAPGKGLEWVSGISWNSGSIGYADSVKGRFTISRDNAKNSLYLQMNSLRAEDTALYYCSVHSFLAYWGQGTLVTVSSASGGGGSGGRASGGGGSDIVMTQTPLSLPVTPGEPASISCRSSQSLLHSNGYNYLDWYLQKPGQSPQLLIYLGSNRASGVPDRFSGSGSGTDFTLKISRVEAEDVGVYYCMQALQTPYTFGQGTKVEIKTTTPAPRPPTPAPTIASQPLSLRPEACRPAAGGAVHTRGLDFACDIYIWAPLAGTCGVLLLSLVITLYCKRGRKKLLYIFKQPFMRPVQTTQEEDGCSCRFPEEEEGGCELRVKFSRSADAPAYKQGQNQLYNELNLGRREEYDVLDKRRGRDPEMGGKPRRKNPQEGLYNELQKDKMAEAYSEIGMKGERRRGKGHDGLYQGLSTATKDTYDALHMQALPPR

SEQ ID NO: 101 - protein, 487 aa, Artificial Sequence
  source: /note="Description of Artificial Sequence: Synthetic polypeptide"
MALPVTALLLPLALLLHAARPEVQLLESGGGLVQPGGSLRLSCAVSGFALSNHGMSWVRRAPGKGLEWVSGIVYSGSTYYAASVKGRFTISRDNSRNTLYLQMNSLRPEDTAIYYCSAHGGESDVWGQGTTVTVSSASGGGGSGGRASGGGGSDIVMTQTPLSLSVTPGQPASISCKSSQSLLRNDGKTPLYWYLQKAGQPPQLLIYEVSNRFSGVPDRFSGSGSGTDFTLKISRVEAEDVGAYYCMQNIQFPSFGGGTKLEIKTTTPAPRPPTPAPTIASQPLSLRPEACRPAAGGAVHTRGLDFACDIYIWAPLAGTCGVLLLSLVITLYCKRGRKKLLYIFKQPFMRPVQTTQEEDGCSCRFPEEEEGGCELRVKFSRSADAPAYKQGQNQLYNELNLGRREEYDVLDKRRGRDPEMGGKPRRKNPQEGLYNELQKDKMAEAYSEIGMKGERRRGKGHDGLYQGLSTATKDTYDALHMQALPPR

SEQ ID NO: 102 - protein, 493 aa, Artificial Sequence
  source: /note="Description of Artificial Sequence: Synthetic polypeptide"
MALPVTALLLPLALLLHAARPQVQLVQSGAEVRKTGASVKVSCKASGYIFDNFGINWVRQAPGQGLEWMGWINPKNNNTNYAQKFQGRVTITADESTNTAYMEVSSLRSEDTAVYYCARGPYYYQSYMDVWGQGTMVTVSSASGGGGSGGRASGGGGSDIVMTQTPLSLPVTPGEPASISCRSSQSLLHSNGYNYLNWYLQKPGQSPQLLIYLGSKRASGVPDRFSGSGSGTDFTLHITRVGAEDVGVYYCMQALQTPYTFGQGTKLEIKTTTPAPRPPTPAPTIASQPLSLRPEACRPAAGGAVHTRGLDFACDIYIWAPLAGTCGVLLLSLVITLYCKRGRKKLLYIFKQPFMRPVQTTQEEDGCSCRFPEEEEGGCELRVKFSRSADAPAYKQGQNQLYNELNLGRREEYDVLDKRRGRDPEMGGKPRRKNPQEGLYNELQKDKMAEAYSEIGMKGERRRGKGHDGLYQGLSTATKDTYDALHMQALPPR

SEQ ID NO: 103 - protein, 490 aa, Artificial Sequence
  source: /note="Description of Artificial Sequence: Synthetic polypeptide"
MALPVTALLLPLALLLHAARPQVQLQESGGGLVQPGGSLRLSCAASGFTFSSDAMTWVRQAPGKGLEWVSVISGSGGTTYYADSVKGRFTISRDNSKNTLYLQMNSLRAEDTAVYYCAKLDSSGYYYARGPRYWGQGTLVTVSSASGGGGSGGRASGGGGSDIQLTQSPSSLSASVGDRVTITCRASQSISSYLNWYQQKPGKAPKLLIYGASTLASGVPARFSGSGSGTHFTLTINSLQSEDSATYYCQQSYKRASFGQGTKVEIKTTTPAPRPPTPAPTIASQPLSLRPEACRPAAGGAVHTRGLDFACDIYIWAPLAGTCGVLLLSLVITLYCKRGRKKLLYIFKQPFMRPVQTTQEEDGCSCRFPEEEEGGCELRVKFSRSADAPAYKQGQNQLYNELNLGRREEYDVLDKRRGRDPEMGGKPRRKNPQEGLYNELQKDKMAEAYSEIGMKGERRRGKGHDGLYQGLSTATKDTYDALHMQALPPR

SEQ ID NO: 104 - protein, 491 aa, Artificial Sequence
  source: /note="Description of Artificial Sequence: Synthetic polypeptide"
MALPVTALLLPLALLLHAARPQVQLVQSGAEVKKPGASVKVSCKASGYTFSNYGITWVRQAPGQGLEWMGWISAYNGNTNYAQKFQGRVTMTRNTSISTAYMELSSLRSEDTAVYYCARGPYYYYMDVWGKGTMVTVSSASGGGGSGGRASGGGGSEIVMTQSPLSLPVTPGEPASISCRSSQSLLYSNGYNYVDWYLQKPGQSPQLLIYLGSNRASGVPDRFSGSGSGTDFKLQISRVEAEDVGIYYCMQGRQFPYSFGQGTKVEIKTTTPAPRPPTPAPTIASQPLSLRPEACRPAAGGAVHTRGLDFACDIYIWAPLAGTCGVLLLSLVITLYCKRGRKKLLYIFKQPFMRPVQTTQEEDGCSCRFPEEEEGGCELRVKFSRSADAPAYKQGQNQLYNELNLGRREEYDVLDKRRGRDPEMGGKPRRKNPQEGLYNELQKDKMAEAYSEIGMKGERRRGKGHDGLYQGLSTATKDTYDALHMQALPPR

SEQ ID NO: 105 - protein, 482 aa, Artificial Sequence
  source: /note="Description of Artificial Sequence: Synthetic polypeptide"
MALPVTALLLPLALLLHAARPEVQLLETGGGLVQPGGSLRLSCAVSGFALSNHGMSWVRRAPGKGLEWVSGIVYSGSTYYAASVKGRFTISRDNSRNTLYLQMNSLRPEDTAIYYCSAHGGESDVWGQGTTVTVSSASGGGGSGGRASGGGGSEIVLTQSPATLSVSPGESATLSCRASQSVSSNLAWYQQKPGQAPRLLIYGASTRASGIPDRFSGSGSGTDFTLTISSLQAEDVAVYYCQQYGSSLTFGGGTKVEIKTTTPAPRPPTPAPTIASQPLSLRPEACRPAAGGAVHTRGLDFACDIYIWAPLAGTCGVLLLSLVITLYCKRGRKKLLYIFKQPFMRPVQTTQEEDGCSCRFPEEEEGGCELRVKFSRSADAPAYKQGQNQLYNELNLGRREEYDVLDKRRGRDPEMGGKPRRKNPQEGLYNELQKDKMAEAYSEIGMKGERRRGKGHDGLYQGLSTATKDTYDALHMQALPPR

SEQ ID NO: 106 - protein, 483 aa, Artificial Sequence
  source: /note="Description of Artificial Sequence: Synthetic polypeptide"
MALPVTALLLPLALLLHAARPEVQLVETGGGLVQPGGSLRLSCAVSGFALSNHGMSWVRRAPGKGLEWVSGIVYSGSTYYAASVKGRFTISRDNSRNTLYLQMNSLRPEDTAIYYCSAHGGESDVWGQGTTVTVSSASGGGGSGGRASGGGGSEIVMTQSPATLSVSPGERATLSCRASQSVSSKLAWYQQKPGQAPRLLMYGASIRATGIPDRFSGSGSGTEFTLTISSLEPEDFAVYYCQQYGSSSWTFGQGTKVEIKTTTPAPRPPTPAPTIASQPLSLRPEACRPAAGGAVHTRGLDFACDIYIWAPLAGTCGVLLLSLVITLYCKRGRKKLLYIFKQPFMRPVQTTQEEDGCSCRFPEEEEGGCELRVKFSRSADAPAYKQGQNQLYNELNLGRREEYDVLDKRRGRDPEMGGKPRRKNPQEGLYNELQKDKMAEAYSEIGMKGERRRGKGHDGLYQGLSTATKDTYDALHMQALPPR

SEQ ID NO: 107 - protein, 485 aa, Artificial Sequence
  source: /note="Description of Artificial Sequence: Synthetic polypeptide"
MALPVTALLLPLALLLHAARPEVQLVETGGGVVQPGGSLRLSCAVSGFALSNHGMSWVRRAPGKGLEWVSGIVYSGSTYYAASVKGRFTISRDNSRNTLYLQMNSLRPEDTAIYYCSAHGGESDVWGQGTTVTVSSASGGGGSGGRASGGGGSEIVLTQSPGTLSLSPGERATLSCRASQSVGSTNLAWYQQKPGQAPRLLIYDASNRATGIPDRFSGGGSGTDFTLTISRLEPEDFAVYYCQQYGSSPPWTFGQGTKVEIKTTTPAPRPPTPAPTIASQPLSLRPEACRPAAGGAVHTRGLDFACDIYIWAPLAGTCGVLLLSLVITLYCKRGRKKLLYIFKQPFMRPVQTTQEEDGCSCRFPEEEEGGCELRVKFSRSADAPAYKQGQNQLYNELNLGRREEYDVLDKRRGRDPEMGGKPRRKNPQEGLYNELQKDKMAEAYSEIGMKGERRRGKGHDGLYQGLSTATKDTYDALHMQALPPR

SEQ ID NO: 108 - protein, 483 aa, Artificial Sequence
  source: /note="Description of Artificial Sequence: Synthetic polypeptide"
MALPVTALLLPLALLLHAARPQVQLVESGGGLVKPGGSLRLSCAASGFTFSDYYMSWIRQAPGKGLEWVSYISSSGSTIYYADSVKGRFTISRDNAKNSLYLQMNSLRAEDTAVYYCARESGDGMDVWGQGTTVTVSSASGGGGSGGRASGGGGSDIQMTQSPSSLSASVGDRVTITCRASQSISSYLNWYQQKPGKAPKLLIYAASSLQSGVPSRFSGSGSGTDFTLTISSLQPEDFATYYCQQSYTLAFGQGTKVDIKTTTPAPRPPTPAPTIASQPLSLRPEACRPAAGGAVHTRGLDFACDIYIWAPLAGTCGVLLLSLVITLYCKRGRKKLLYIFKQPFMRPVQTTQEEDGCSCRFPEEEEGGCELRVKFSRSADAPAYKQGQNQLYNELNLGRREEYDVLDKRRGRDPEMGGKPRRKNPQEGLYNELQKDKMAEAYSEIGMKGERRRGKGHDGLYQGLSTATKDTYDALHMQALPPR

SEQ ID NO: 109 - protein, 483 aa, Artificial Sequence
  source: /note="Description of Artificial Sequence: Synthetic polypeptide"
MALPVTALLLPLALLLHAARPEVQLVESGGGLVQPGGSLRLSCAVSGFALSNHGMSWVRRAPGKGLEWVSGIVYSGSTYYAASVKGRFTISRDNSRNTLYLQMNSLRPEDTAIYYCSAHGGESDVWGQGTTVTVSSASGGGGSGGRASGGGGSDIQLTQSPSSLSASVGDRVTITCRASQSISSYLNWYQQKPGKAPKLLIYAASSLQSGVPSRFSGSGSGTDFTLTISSLQPEDFATYYCQQSYSTPYTFGQGTKVEIKTTTPAPRPPTPAPTIASQPLSLRPEACRPAAGGAVHTRGLDFACDIYIWAPLAGTCGVLLLSLVITLYCKRGRKKLLYIFKQPFMRPVQTTQEEDGCSCRFPEEEEGGCELRVKFSRSADAPAYKQGQNQLYNELNLGRREEYDVLDKRRGRDPEMGGKPRRKNPQEGLYNELQKDKMAEAYSEIGMKGERRRGKGHDGLYQGLSTATKDTYDALHMQALPPR

SEQ ID NO: 110 - protein, 490 aa, Artificial Sequence
  source: /note="Description of Artificial Sequence: Synthetic polypeptide"
MALPVTALLLPLALLLHAARPQVQLVQSGGGLVKPGGSLRLSCAASGFTFSDYYMSWIRQAPGKGLEWVSYISSSGNTIYYADSVKGRFTISRDNAKNSLYLQMNSLRAEDTAVYYCARSTMVREDYWGQGTLVTVSSASGGGGSGGRASGGGGSDIVLTQSPLSLPVTLGQPASISCKSSESLVHNSGKTYLNWFHQRPGQSPRRLIYEVSNRDSGVPDRFTGSGSGTDFTLKISRVEAEDVGVYYCMQGTHWPGTFGQGTKLEIKTTTPAPRPPTPAPTIASQPLSLRPEACRPAAGGAVHTRGLDFACDIYIWAPLAGTCGVLLLSLVITLYCKRGRKKLLYIFKQPFMRPVQTTQEEDGCSCRFPEEEEGGCELRVKFSRSADAPAYKQGQNQLYNELNLGRREEYDVLDKRRGRDPEMGGKPRRKNPQEGLYNELQKDKMAEAYSEIGMKGERRRGKGHDGLYQGLSTATKDTYDALHMQALPPR

SEQ ID NO: 111 - protein, 483 aa, Artificial Sequence
  source: /note="Description of Artificial Sequence: Synthetic polypeptide"
MALPVTALLLPLALLLHAARPQVQLVESGGGLVQPGGSLRLSCAVSGFALSNHGMSWVRRAPGKGLEWVSGIVYSGSTYYAASVKGRFTISRDNSRNTLYLQMNSLRPEDTAIYYCSAHGGESDVWGQGTTVTVSSASGGGGSGGRASGGGGSDIRLTQSPSPLSASVGDRVTITCQASEDINKFLNWYHQTPGKAPKLLIYDASTLQTGVPSRFSGSGSGTDFTLTINSLQPEDIGTYYCQQYESLPLTFGGGTKVEIKTTTPAPRPPTPAPTIASQPLSLRPEACRPAAGGAVHTRGLDFACDIYIWAPLAGTCGVLLLSLVITLYCKRGRKKLLYIFKQPFMRPVQTTQEEDGCSCRFPEEEEGGCELRVKFSRSADAPAYKQGQNQLYNELNLGRREEYDVLDKRRGRDPEMGGKPRRKNPQEGLYNELQKDKMAEAYSEIGMKGERRRGKGHDGLYQGLSTATKDTYDALHMQALPPR

SEQ ID NO: 112 - protein, 484 aa, Artificial Sequence
  source: /note="Description of Artificial Sequence: Synthetic polypeptide"
MALPVTALLLPLALLLHAARPEVQLVETGGGLVQPGGSLRLSCAVSGFALSNHGMSWVRRAPGKGLEWVSGIVYSGSTYYAASVKGRFTISRDNSRNTLYLQMNSLRPEDTAIYYCSAHGGESDVWGQGTTVTVSSASGGGGSGGRASGGGGSETTLTQSPATLSVSPGERATLSCRASQSVGSNLAWYQQKPGQGPRLLIYGASTRATGIPARFSGSGSGTEFTLTISSLQPEDFAVYYCQQYNDWLPVTFGQGTKVEIKTTTPAPRPPTPAPTIASQPLSLRPEACRPAAGGAVHTRGLDFACDIYIWAPLAGTCGVLLLSLVITLYCKRGRKKLLYIFKQPFMRPVQTTQEEDGCSCRFPEEEEGGCELRVKFSRSADAPAYKQGQNQLYNELNLGRREEYDVLDKRRGRDPEMGGKPRRKNPQEGLYNELQKDKMAEAYSEIGMKGERRRGKGHDGLYQGLSTATKDTYDALHMQALPPR

SEQ ID NO: 113 - protein, 485 aa, Artificial Sequence
  source: /note="Description of Artificial Sequence: Synthetic polypeptide"
MALPVTALLLPLALLLHAARPEVQLVESGGGLVQPGGSLRLSCAVSGFALSNHGMSWVRRAPGKGLEWVSGIVYSGSTYYAASVKGRFTISRDNSRNTLYLQMNSLRPEDTAIYYCSAHGGESDVWGQGTTVTVSSASGGGGSGGRASGGGGSEIVLTQSPGTLSLSPGERATLSCRASQSIGSSSLAWYQQKPGQAPRLLMYGASSRASGIPDRFSGSGSGTDFTLTISRLEPEDFAVYYCQQYAGSPPFTFGQGTKVEIKTTTPAPRPPTPAPTIASQPLSLRPEACRPAAGGAVHTRGLDFACDIYIWAPLAGTCGVLLLSLVITLYCKRGRKKLLYIFKQPFMRPVQTTQEEDGCSCRFPEEEEGGCELRVKFSRSADAPAYKQGQNQLYNELNLGRREEYDVLDKRRGRDPEMGGKPRRKNPQEGLYNELQKDKMAEAYSEIGMKGERRRGKGHDGLYQGLSTATKDTYDALHMQALPPR

SEQ ID NO: 114 - DNA, 1470 bp, Artificial Sequence
  source: /note="Description of Artificial Sequence: Synthetic polynucleotide"
atggccctccctgtcaccgccctgctgcttccgctggctcttctgctccacgccgctcggccccaagtgcaactcgtggaatctggtggaggactcgtgcaacccggaagatcgcttagactgtcgtgtgccgccagcgggttcactttctcgaactacgcgatgtcctgggtccgccaggcacccggaaagggactcggttgggtgtccggcatttcccggtccggcgaaaatacctactacgccgactccgtgaagggccgcttcaccatctcaagggacaacagcaaaaacaccctgtacttgcaaatgaactccctgcgggatgaagatacagccgtgtactattgcgcccggtcgcctgcccattactacggcggaatggacgtctggggacagggaaccactgtgactgtcagcagcgcgtcgggtggcggcggctcagggggtcgggcctccggggggggagggtccgacatcgtgctgacccagtccccgggaaccctgagcctgagcccgggagagcgcgcgaccctgtcatgccgggcatcccagagcattagctcctcctttctcgcctggtatcagcagaagcccggacaggccccgaggctgctgatctacggcgctagcagaagggctaccggaatcccagaccggttctccggctccggttccgggaccgatttcacccttactatctcgcgcctggaacctgaggactccgccgtctactactgccagcagtaccactcatccccgtcgtggacgttcggacagggcaccaagctggagattaagaccactaccccagcaccgaggccacccaccccggctcctaccatcgcctcccagcctctgtccctgcgtccggaggcatgtagacccgcagctggtggggccgtgcatacccggggtcttgacttcgcctgcgatatctacatttgggcccctctggctggtacttgcggggtcctgctgctttcactcgtgatcactctttactgtaagcgcggtcggaagaagctgctgtacatctttaagcaacccttcatgaggcctgtgcagactactcaagaggaggacggctgttcatgccggttcccagaggaggaggaaggcggctgcgaactgcgcgtgaaattcagccgcagcgcagatgctccagcctacaagcaggggcagaaccagctctacaacgaactcaatcttggtcggagagaggagtacgacgtgctggacaagcggagaggacgggacccagaaatgggcgggaagccgcgcagaaagaatccccaagagggcctgtacaacgagctccaaaaggataagatggcagaagcctatagcgagattggtatgaaaggggaacgcagaagaggcaaaggccacgacggactgtaccagggactcagcaccgccaccaaggacacctatgacgctcttcacatgcaggccctgccgcctcgg

SEQ ID NO: 115 - DNA, 1464 bp, Artificial Sequence
  source: /note="Description of Artificial Sequence: Synthetic polynucleotide"
atggccctccctgtcaccgccctgctgcttccgctggctcttctgctccacgccgctcggccccaagtgcaactcgtcgaatccggtggaggtctggtccaacctggtagaagcctgagactgtcgtgtgcggccagcggattcacctttgatgactatgctatgcactgggtgcggcaggccccaggaaagggcctggaatgggtgtcgggaattagctggaactccgggtccattggctacgccgactccgtgaagggccgcttcaccatctcccgcgacaacgcaaagaactccctgtacttgcaaatgaactcgctcagggctgaggataccgcgctgtactactgctccgtgcattccttcctggcctactggggacagggaactctggtcaccgtgtcgagcgcctccggcggcgggggctcgggtggacgggcctcgggcggaggggggtccgacatcgtgatgacccagaccccgctgagcttgcccgtgactcccggagagcctgcatccatctcctgccggtcatcccagtcccttctccactccaacggatacaactacctcgactggtacctccagaagccgggacagagccctcagcttctgatctacctggggtcaaatagagcctcaggagtgccggatcggttcagcggatctggttcgggaactgatttcactctgaagatttcccgcgtggaagccgaggacgtgggcgtctactactgtatgcaggcgctgcagaccccctataccttcggccaagggacgaaagtggagatcaagaccactaccccagcaccgaggccacccaccccggctcctaccatcgcctcccagcctctgtccctgcgtccggaggcatgtagacccgcagctggtggggccgtgcatacccggggtcttgacttcgcctgcgatatctacatttgggcccctctggctggtacttgcggggtcctgctgctttcactcgtgatcactctttactgtaagcgcggtcggaagaagctgctgtacatctttaagcaacccttcatgaggcctgtgcagactactcaagaggaggacggctgttcatgccggttcccagaggaggaggaaggcggctgcgaactgcgcgtgaaattcagccgcagcgcagatgctccagcctacaagcaggggcagaaccagctctacaacgaactcaatcttggtcggagagaggagtacgacgtgctggacaagcggagaggacgggacccagaaatgggcgggaagccgcgcagaaagaatccccaagagggcctgtacaacgagctccaaaaggataagatggcagaagcctatagcgagattggtatgaaaggggaacgcagaagaggcaaaggccacgacggactgtaccagggactcagcaccgccaccaaggacacctatgacgctcttcacatgcaggccctgccgcctcgg

SEQ ID NO: 116 - DNA, 1461 bp, Artificial Sequence
  source: /note="Description of Artificial Sequence: Synthetic polynucleotide"
atggccctccctgtcaccgccctgctgcttccgctggctcttctgctccacgccgctcggcccgaagtgcaattgttggaatctggaggaggacttgtgcagcctggaggatcactgagactttcgtgtgcggtgtcaggcttcgccctgagcaaccacggcatgagctgggtgcggagagccccggggaagggtctggaatgggtgtccgggatcgtctactccggttcaacttactacgccgcaagcgtgaagggtcgcttcaccatttcccgcgataactcccggaacaccctgtacctccaaatgaactccctgcggcccgaggacaccgccatctactactgttccgcgcatggaggagagtccgatgtctggggacagggcactaccgtgaccgtgtcgagcgcctcggggggaggaggctccggcggtcgcgcctccggggggggtggcagcgacattgtgatgacgcagactccactctcgctgtccgtgaccccgggacagcccgcgtccatctcgtgcaagagctcccagagcctgctgaggaacgacggaaagactcctctgtattggtacctccagaaggctggacagcccccgcaactgctcatctacgaagtgtcaaatcgcttctccggggtgccggatcggttttccggctcgggatcgggcaccgacttcaccctgaaaatctccagggtcgaggccgaggacgtgggagcctactactgcatgcaaaacatccagttcccttccttcggcggcggcacaaagctggagattaagaccactaccccagcaccgaggccacccaccccggctcctaccatcgcctcccagcctctgtccctgcgtccggaggcatgtagacccgcagctggtggggccgtgcatacccggggtcttgacttcgcctgcgatatctacatttgggcccctctggctggtacttgcggggtcctgctgctttcactcgtgatcactctttactgtaagcgcggtcggaagaagctgctgtacatctttaagcaacccttcatgaggcctgtgcagactactcaagaggaggacggctgttcatgccggttcccagaggaggaggaaggcggctgcgaactgcgcgtgaaattcagccgcagcgcagatgctccagcctacaagcaggggcagaaccagctctacaacgaactcaatcttggtcggagagaggagtacgacgtgctggacaagcggagaggacgggacccagaaatgggcgggaagccgcgcagaaagaatccccaagagggcctgtacaacgagctccaaaaggataagatggcagaagcctatagcgagattggtatgaaaggggaacgcagaagaggcaaaggccacgacggactgtaccagggactcagcaccgccaccaaggacacctatgacgctcttcacatgcaggccctgccgcctcgg

SEQ ID NO: 117 - DNA, 1479 bp, Artificial Sequence
  source: /note="Description of Artificial Sequence: Synthetic polynucleotide"
atggccctccctgtcaccgccctgctgcttccgctggctcttctgctccacgccgctcggccccaagtccaactcgtccagtccggcgcagaagtcagaaaaaccggtgctagcgtgaaagtgtcctgcaaggcctccggctacattttcgataacttcggaatcaactgggtcagacaggccccgggccaggggctggaatggatgggatggatcaaccccaagaacaacaacaccaactacgcacagaagttccagggccgcgtgactatcaccgccgatgaatcgaccaataccgcctacatggaggtgtcctccctgcggtcggaggacactgccgtgtattactgcgcgaggggcccatactactaccaaagctacatggacgtctggggacagggaaccatggtgaccgtgtcatccgcctccggtggtggaggctccggggggcgggcttcaggaggcggaggaagcgatattgtgatgacccagactccgcttagcctgcccgtgactcctggagaaccggcctccatttcctgccggtcctcgcaatcactcctgcattccaacggttacaactacctgaattggtacctccagaagcctggccagtcgccccagttgctgatctatctgggctcgaagcgcgcctccggggtgcctgaccggtttagcggatctgggagcggcacggacttcactctccacatcacccgcgtgggagcggaggacgtgggagtgtactactgtatgcaggcgctgcagactccgtacacattcggacagggcaccaagctggagatcaagaccactaccccagcaccgaggccacccaccccggctcctaccatcgcctcccagcctctgtccctgcgtccggaggcatgtagacccgcagctggtggggccgtgcatacccggggtcttgacttcgcctgcgatatctacatttgggcccctctggctggtacttgcggggtcctgctgctttcactcgtgatcactctttactgtaagcgcggtcggaagaagctgctgtacatctttaagcaacccttcatgaggcctgtgcagactactcaagaggaggacggctgttcatgccggttcccagaggaggaggaaggcggctgcgaactgcgcgtgaaattcagccgcagcgcagatgctccagcctacaagcaggggcagaaccagctctacaacgaactcaatcttggtcggagagaggagtacgacgtgctggacaagcggagaggacgggacccagaaatgggcgggaagccgcgcagaaagaatccccaagagggcctgtacaacgagctccaaaaggataagatggcagaagcctatagcgagattggtatgaaaggggaacgcagaagaggcaaaggccacgacggactgtaccagggactcagcaccgccaccaaggacacctatgacgctcttcacatgcaggccctgccgcctcgg

SEQ ID NO: 118 - DNA, 1470 bp, Artificial Sequence
  source: /note="Description of Artificial Sequence: Synthetic polynucleotide"
atggccctccctgtcaccgccctgctgcttccgctggctcttctgctccacgccgctcggccccaagtgcaacttcaagaatcaggcggaggactcgtgcagcccggaggatcattgcggctctcgtgcgccgcctcgggcttcaccttctcgagcgacgccatgacctgggtccgccaggccccggggaaggggctggaatgggtgtctgtgatttccggctccgggggaactacgtactacgccgattccgtgaaaggtcgcttcactatctcccgggacaacagcaagaacaccctttatctgcaaatgaattccctccgcgccgaggacaccgccgtgtactactgcgccaagctggactcctcgggctactactatgcccggggtccgagatactggggacagggaaccctcgtgaccgtgtcctccgcgtccggcggaggagggtcgggagggcgggcctccggcggcggcggttcggacatccagctgacccagtccccatcctcactgagcgcaagcgtgggcgacagagtcaccattacatgcagggcgtcccagagcatcagctcctacctgaactggtaccaacagaagcctggaaaggctcctaagctgttgatctacggggcttcgaccctggcatccggggtgcccgcgaggtttagcggaagcggtagcggcactcacttcactctgaccattaacagcctccagtccgaggattcagccacttactactgtcagcagtcctacaagcgggccagcttcggacagggcactaaggtcgagatcaagaccactaccccagcaccgaggccacccaccccggctcctaccatcgcctcccagcctctgtccctgcgtccggaggcatgtagacccgcagctggtggggccgtgcatacccggggtcttgacttcgcctgcgatatctacatttgggcccctctggctggtacttgcggggtcctgctgctttcactcgtgatcactctttactgtaagcgcggtcggaagaagctgctgtacatctttaagcaacccttcatgaggcctgtgcagactactcaagaggaggacggctgttcatgccggttcccagaggaggaggaaggcggctgcgaactgcgcgtgaaattcagccgcagcgcagatgctccagcctacaagcaggggcagaaccagctctacaacgaactcaatcttggtcggagagaggagtacgacgtgctggacaagcggagaggacgggacccagaaatgggcgggaagccgcgcagaaagaatccccaagagggcctgtacaacgagctccaaaaggataagatggcagaagcctatagcgagattggtatgaaaggggaacgcagaagaggcaaaggccacgacggactgtaccagggactcagcaccgccaccaaggacacctatgacgctcttcacatgcaggccctgccgcctcgg

SEQ ID NO: 119 - DNA, 1473 bp, Artificial Sequence
  source: /note="Description of Artificial Sequence: Synthetic polynucleotide"
atggccctccctgtcaccgccctgctgcttccgctggctcttctgctccacgccgctcggccccaagtccaactggtccagagcggtgcagaagtgaagaagcccggagcgagcgtgaaagtgtcctgcaaggcttccgggtacaccttctccaactacggcatcacttgggtgcgccaggccccgggacagggcctggaatggatggggtggatttccgcgtacaacggcaatacgaactacgctcagaagttccagggtagagtgaccatgactaggaacacctccatttccaccgcctacatggaactgtcctccctgcggagcgaggacaccgccgtgtactattgcgcccggggaccatactactactacatggatgtctgggggaaggggactatggtcaccgtgtcatccgcctcgggaggcggcggatcaggaggacgcgcctctggtggtggaggatcggagatcgtgatgacccagagccctctctccttgcccgtgactcctggggagcccgcatccatttcatgccggagctcccagtcacttctctactccaacggctataactacgtggattggtacctccaaaagccgggccagagcccgcagctgctgatctacctgggctcgaacagggccagcggagtgcctgaccggttctccgggtcgggaagcgggaccgacttcaagctgcaaatctcgagagtggaggccgaggacgtgggaatctactactgtatgcagggccgccagtttccgtactcgttcggacagggcaccaaagtggaaatcaagaccactaccccagcaccgaggccacccaccccggctcctaccatcgcctcccagcctctgtccctgcgtccggaggcatgtagacccgcagctggtggggccgtgcatacccggggtcttgacttcgcctgcgatatctacatttgggcccctctggctggtacttgcggggtcctgctgctttcactcgtgatcactctttactgtaagcgcggtcggaagaagctgctgtacatctttaagcaacccttcatgaggcctgtgcagactactcaagaggaggacggctgttcatgccggttcccagaggaggaggaaggcggctgcgaactgcgcgtgaaattcagccgcagcgcagatgctccagcctacaagcaggggcagaaccagctctacaacgaactcaatcttggtcggagagaggagtacgacgtgctggacaagcggagaggacgggacccagaaatgggcgggaagccgcgcagaaagaatccccaagagggcctgtacaacgagctccaaaaggataagatggcagaagcctatagcgagattggtatgaaaggggaacgcagaagaggcaaaggccacgacggactgtaccagggactcagcaccgccaccaaggacacctatgacgctcttcacatgcaggccctgccgcctcgg

SEQ ID NO: 120 - DNA, 1446 bp, Artificial Sequence
  source: /note="Description of Artificial Sequence: Synthetic polynucleotide"
atggccctccctgtcaccgccctgctgcttccgctggctcttctgctccacgccgctcggcccgaagtgcaattgctcgaaactggaggaggtctggtgcaacctggaggatcacttcgcctgtcctgcgccgtgtcgggctttgccctgtccaaccatggaatgagctgggtccgccgcgcgccggggaagggcctcgaatgggtgtccggcatcgtctactccggctccacctactacgccgcgtccgtgaagggccggttcacgatttcacgggacaactcgcggaacaccctgtacctccaaatgaattcccttcggccggaggatactgccatctactactgctccgcccacggtggcgaatccgacgtctggggccagggaaccaccgtgaccgtgtccagcgcgtccgggggaggaggaagcgggggtagagcatcgggtggaggcggatcagagatcgtgctgacccagtcccccgccaccttgagcgtgtcaccaggagagtccgccaccctgtcatgccgcgccagccagtccgtgtcctccaacctggcttggtaccagcagaagccggggcaggcccctagactcctgatctatggggcgtcgacccgggcatctggaattcccgataggttcagcggatcgggctcgggcactgacttcactctgaccatctcctcgctgcaagccgaggacgtggctgtgtactactgtcagcagtacggaagctccctgactttcggtggcgggaccaaagtcgagattaagaccactaccccagcaccgaggccacccaccccggctcctaccatcgcctcccagcctctgtccctgcgtccggaggcatgtagacccgcagctggtggggccgtgcatacccggggtcttgacttcgcctgcgatatctacatttgggcccctctggctggtacttgcggggtcctgctgctttcactcgtgatcactctttactgtaagcgcggtcggaagaagctgctgtacatctttaagcaacccttcatgaggcctgtgcagactactcaagaggaggacggctgttcatgccggttcccagaggaggaggaaggcggctgcgaactgcgcgtgaaattcagccgcagcgcagatgctccagcctacaagcaggggcagaaccagctctacaacgaactcaatcttggtcggagagaggagtacgacgtgctggacaagcggagaggacgggacccagaaatgggcgggaagccgcgcagaaagaatccccaagagggcctgtacaacgagctccaaaaggataagatggcagaagcctatagcgagattggtatgaaaggggaacgcagaagaggcaaaggccacgacggactgtaccagggactcagcaccgccaccaaggacacctatgacgctcttcacatgcaggccctgccgcctcgg

SEQ ID NO: 121 - DNA, 1449 bp, Artificial Sequence
  source: /note="Description of Artificial Sequence: Synthetic polynucleotide"
atggccctccctgtcaccgccctgctgcttccgctggctcttctgctccacgccgctcggcccgaagtgcaattggtggaaactggaggaggacttgtgcaacctggaggatcattgagactgagctgcgcagtgtcgggattcgccctgagcaaccatggaatgtcctgggtcagaagggcccctggaaaaggcctcgaatgggtgtcagggatcgtgtactccggttccacttactacgccgcctccgtgaaggggcgcttcactatctcacgggataactcccgcaataccctgtacctccaaatgaacagcctgcggccggaggataccgccatctactactgttccgcccacggtggagagtctgacgtctggggccagggaactaccgtgaccgtgtcctccgcgtccggcggtggagggagcggcggccgcgccagcggcggcggaggctccgagatcgtgatgacccagagccccgctactctgtcggtgtcgcccggagaaagggcgaccctgtcctgccgggcgtcgcagtccgtgagcagcaagctggcttggtaccagcagaagccgggccaggcaccacgcctgcttatgtacggtgcctccattcgggccaccggaatcccggaccggttctcggggtcggggtccggtaccgagttcacactgaccatttcctcgctcgagcccgaggactttgccgtctattactgccagcagtacggctcctcctcatggacgttcggccaggggaccaaggtcgaaatcaagaccactaccccagcaccgaggccacccaccccggctcctaccatcgcctcccagcctctgtccctgcgtccggaggcatgtagacccgcagctggtggggccgtgcatacccggggtcttgacttcgcctgcgatatctacatttgggcccctctggctggtacttgcggggtcctgctgctttcactcgtgatcactctttactgtaagcgcggtcggaagaagctgctgtacatctttaagcaacccttcatgaggcctgtgcagactactcaagaggaggacggctgttcatgccggttcccagaggaggaggaaggcggctgcgaactgcgcgtgaaattcagccgcagcgcagatgctccagcctacaagcaggggcagaaccagctctacaacgaactcaatcttggtcggagagaggagtacgacgtgctggacaagcggagaggacgggacccagaaatgggcgggaagccgcgcagaaagaatccccaagagggcctgtacaacgagctccaaaaggataagatggcagaagcctatagcgagattggtatgaaaggggaacgcagaagaggcaaaggccacgacggactgtaccagggactcagcaccgccaccaaggacacctatgacgctcttcacatgcaggccctgccgcctcgg

SEQ ID NO: 122 - DNA, 1455 bp, Artificial Sequence
  source: /note="Description of Artificial Sequence: Synthetic polynucleotide"
atggccctccctgtcaccgccctgctgcttccgctggctcttctgctccacgccgctcggcccgaagtgcaattggtggagactggaggaggagtggtgcaacctggaggaagcctgagactgtcatgcgcggtgtcgggcttcgccctctccaaccacggaatgtcctgggtccgccgggcccctgggaaaggacttgaatgggtgtccggcatcgtgtactcgggttccacctactacgcggcctcagtgaagggccggtttactattagccgcgacaactccagaaacacactgtacctccaaatgaactcgctgcggccggaagataccgctatctactactgctccgcccatgggggagagtcggacgtctggggacagggcaccactgtcactgtgtccagcgcttccggcggtggtggaagcgggggacgggcctcaggaggcggtggcagcgagattgtgctgacccagtcccccgggaccctgagcctgtccccgggagaaagggccaccctctcctgtcgggcatcccagtccgtggggtctactaaccttgcatggtaccagcagaagcccggccaggcccctcgcctgctgatctacgacgcgtccaatagagccaccggcatcccggatcgcttcagcggaggcggatcgggcaccgacttcaccctcaccatttcaaggctggaaccggaggacttcgccgtgtactactgccagcagtatggttcgtccccaccctggacgttcggccaggggactaaggtcgagatcaagaccactaccccagcaccgaggccacccaccccggctcctaccatcgcctcccagcctctgtccctgcgtccggaggcatgtagacccgcagctggtggggccgtgcatacccggggtcttgacttcgcctgcgatatctacatttgggcccctctggctggtacttgcggggtcctgctgctttcactcgtgatcactctttactgtaagcgcggtcggaagaagctgctgtacatctttaagcaacccttcatgaggcctgtgcagactactcaagaggaggacggctgttcatgccggttcccagaggaggaggaaggcggctgcgaactgcgcgtgaaattcagccgcagcgcagatgctccagcctacaagcaggggcagaaccagctctacaacgaactcaatcttggtcggagagaggagtacgacgtgctggacaagcggagaggacgggacccagaaatgggcgggaagccgcgcagaaagaatccccaagagggcctgtacaacgagctccaaaaggataagatggcagaagcctatagcgagattggtatgaaaggggaacgcagaagaggcaaaggccacgacggactgtaccagggactcagcaccgccaccaaggacacctatgacgctcttcacatgcaggccctgccgcctcgg

SEQ ID NO: 123 - DNA, 1449 bp, Artificial Sequence
  source: /note="Description of Artificial Sequence: Synthetic polynucleotide"
atggccctccctgtcaccgccctgctgcttccgctggctcttctgctccacgccgctcggccccaagtgcaactcgtggaatctggtggaggactcgtgaaacctggaggatcattgagactgtcatgcgcggcctcgggattcacgttctccgattactacatgagctggattcgccaggctccggggaagggactggaatgggtgtcctacatttcctcatccggctccaccatctactacgcggactccgtgaaggggagattcaccattagccgcgataacgccaagaacagcctgtaccttcagatgaactccctgcgggctgaagatactgccgtctactactgcgcaagggagagcggagatgggatggacgtctggggacagggtaccactgtgaccgtgtcgtcggcctccggcggagggggttcgggtggaagggccagcggcggcggaggcagcgacatccagatgacccagtccccctcatcgctgtccgcctccgtgggcgaccgcgtcaccatcacatgccgggcctcacagtcgatctcctcctacctcaattggtatcagcagaagcccggaaaggcccctaagcttctgatctacgcagcgtcctccctgcaatccggggtcccatctcggttctccggctcgggcagcggtaccgacttcactctgaccatctcgagcctgcagccggaggacttcgccacttactactgtcagcaaagctacaccctcgcgtttggccagggcaccaaagtggacatcaagaccactaccccagcaccgaggccacccaccccggctcctaccatcgcctcccagcctctgtccctgcgtccggaggcatgtagacccgcagctggtggggccgtgcatacccggggtcttgacttcgcctgcgatatctacatttgggcccctctggctggtacttgcggggtcctgctgctttcactcgtgatcactctttactgtaagcgcggtcggaagaagctgctgtacatctttaagcaacccttcatgaggcctgtgcagactactcaagaggaggacggctgttcatgccggttcccagaggaggaggaaggcggctgcgaactgcgcgtgaaattcagccgcagcgcagatgctccagcctacaagcaggggcagaaccagctctacaacgaactcaatcttggtcggagagaggagtacgacgtgctggacaagcggagaggacgggacccagaaatgggcgggaagccgcgcagaaagaatccccaagagggcctgtacaacgagctccaaaaggataagatggcagaagcctatagcgagattggtatgaaaggggaacgcagaagaggcaaaggccacgacggactgtaccagggactcagcaccgccaccaaggacacctatgacgctcttcacatgcaggccctgccgcctcgg

SEQ ID NO: 124 - DNA, 1449 bp, Artificial Sequence
  source: /note="Description of Artificial Sequence: Synthetic polynucleotide"
atggccctccctgtcaccgccctgctgcttccgctggctcttctgctccacgccgctcggcccgaagtgcaattggtggaatcagggggaggacttgtgcagcctggaggatcgctgagactgtcatgtgccgtgtccggctttgccctgtccaaccacgggatgtcctgggtccgccgcgcgcctggaaagggcctcgaatgggtgtcgggtattgtgtacagcggtagcacctactatgccgcatccgtgaaggggagattcaccatcagccgggacaactccaggaacactctgtacctccaaatgaattcgctgaggccagaggacactgccatctactactgctccgcgcatggcggagagtccgacgtctggggacaggggaccaccgtgaccgtgtctagcgcgtccggcggaggcggcagcgggggtcgggcatcagggggcggcggatcggacatccagctcacccagtccccgagctcgctgtccgcctccgtgggagatcgggtcaccatcacgtgccgcgccagccagtcgatttcctcctacctgaactggtaccaacagaagcccggaaaagccccgaagcttctcatctacgccgcctcgagcctgcagtcaggagtgccctcacggttctccggctccggttccggtactgatttcaccctgaccatttcctccctgcaaccggaggacttcgctacttactactgccagcagtcgtactccaccccctacactttcggacaaggcaccaaggtcgaaatcaagaccactaccccagcaccgaggccacccaccccggctcctaccatcgcctcccagcctctgtccctgcgtccggaggcatgtagacccgcagctggtggggccgtgcatacccggggtcttgacttcgcctgcgatatctacatttgggcccctctggctggtacttgcggggtcctgctgctttcactcgtgatcactctttactgtaagcgcggtcggaagaagctgctgtacatctttaagcaacccttcatgaggcctgtgcagactactcaagaggaggacggctgttcatgccggttcccagaggaggaggaaggcggctgcgaactgcgcgtgaaattcagccgcagcgcagatgctccagcctacaagcaggggcagaaccagctctacaacgaactcaatcttggtcggagagaggagtacgacgtgctggacaagcggagaggacgggacccagaaatgggcgggaagccgcgcagaaagaatccccaagagggcctgtacaacgagctccaaaaggataagatggcagaagcctatagcgagattggtatgaaaggggaacgcagaagaggcaaaggccacgacggactgtaccagggactcagcaccgccaccaaggacacctatgacgctcttcacatgcaggccctgccgcctcgg

SEQ ID NO: 125 - DNA, 1470 bp, Artificial Sequence
  source: /note="Description of Artificial Sequence: Synthetic polynucleotide"
atggccctccctgtcaccgccctgctgcttccgctggctcttctgctccacgccgctcggccccaagtgcaactggtgcaaagcggaggaggattggtcaaacccggaggaagcctgagactgtcatgcgcggcctctggattcaccttctccgattactacatgtcatggatcagacaggccccggggaagggcctcgaatgggtgtcctacatctcgtcctccgggaacaccatctactacgccgacagcgtgaagggccgctttaccatttcccgcgacaacgcaaagaactcgctgtaccttcagatgaattccctgcgggctgaagataccgcggtgtactattgcgcccggtccactatggtccgggaggactactggggacagggcacactcgtgaccgtgtccagcgcgagcgggggtggaggcagcggtggacgcgcctccggcggcggcggttcagacatcgtgctgactcagtcgcccctgtcgctgccggtcaccctgggccaaccggcctcaattagctgcaagtcctcggagagcctggtgcacaactcaggaaagacttacctgaactggttccatcagcggcctggacagtccccacggaggctcatctatgaagtgtccaacagggattcgggggtgcccgaccgcttcactggctccgggtccggcaccgacttcaccttgaaaatctccagagtggaagccgaggacgtgggcgtgtactactgtatgcagggtacccactggcctggaacctttggacaaggaactaagctcgagattaagaccactaccccagcaccgaggccacccaccccggctcctaccatcgcctcccagcctctgtccctgcgtccggaggcatgtagacccgcagctggtggggccgtgcatacccggggtcttgacttcgcctgcgatatctacatttgggcccctctggctggtacttgcggggtcctgctgctttcactcgtgatcactctttactgtaagcgcggtcggaagaagctgctgtacatctttaagcaacccttcatgaggcctgtgcagactactcaagaggaggacggctgttcatgccggttcccagaggaggaggaaggcggctgcgaactgcgcgtgaaattcagccgcagcgcagatgctccagcctacaagcaggggcagaaccagctctacaacgaactcaatcttggtcggagagaggagtacgacgtgctggacaagcggagaggacgggacccagaaatgggcgggaagccgcgcagaaagaatccccaagagggcctgtacaacgagctccaaaaggataagatggcagaagcctatagcgagattggtatgaaaggggaacgcagaagaggcaaaggccacgacggactgtaccagggactcagcaccgccaccaaggacacctatgacgctcttcacatgcaggccctgccgcctcgg

SEQ ID NO: 126 - DNA, 1449 bp, Artificial Sequence
  source: /note="Description of Artificial Sequence: Synthetic polynucleotide"
atggccctccctgtcaccgccctgctgcttccgctggctcttctgctccacgccgctcggccccaagtgcaactcgtggaatctggtggaggactcgtgcaacccggtggaagccttaggctgtcgtgcgccgtcagcgggtttgctctgagcaaccatggaatgtcctgggtccgccgggcaccgggaaaagggctggaatgggtgtccggcatcgtgtacagcgggtcaacctattacgccgcgtccgtgaagggcagattcactatctcaagagacaacagccggaacaccctgtacttgcaaatgaattccctgcgccccgaggacaccgccatctactactgctccgcccacggaggagagtcggacgtgtggggccagggaacgactgtgactgtgtccagcgcatcaggagggggtggttcgggcggccgggcctcggggggaggaggttccgacattcggctgacccagtccccgtccccactgtcggcctccgtcggcgaccgcgtgaccatcacttgtcaggcgtccgaggacattaacaagttcctgaactggtaccaccagacccctggaaaggcccccaagctgctgatctacgatgcctcgacccttcaaactggagtgcctagccggttctccgggtccggctccggcactgatttcactctgaccatcaactcattgcagccggaagatatcgggacctactattgccagcagtacgaatccctcccgctcacattcggcgggggaaccaaggtcgagattaagaccactaccccagcaccgaggccacccaccccggctcctaccatcgcctcccagcctctgtccctgcgtccggaggcatgtagacccgcagctggtggggccgtgcatacccggggtcttgacttcgcctgcgatatctacatttgggcccctctggctggtacttgcggggtcctgctgctttcactcgtgatcactctttactgtaagcgcggtcggaagaagctgctgtacatctttaagcaacccttcatgaggcctgtgcagactactcaagaggaggacggctgttcatgccggttcccagaggaggaggaaggcggctgcgaactgcgcgtgaaattcagccgcagcgcagatgctccagcctacaagcaggggcagaaccagctctacaacgaactcaatcttggtcggagagaggagtacgacgtgctggacaagcggagaggacgggacccagaaatgggcgggaagccgcgcagaaagaatccccaagagggcctgtacaacgagctccaaaaggataagatggcagaagcctatagcgagattggtatgaaaggggaacgcagaagaggcaaaggccacgacggactgtaccagggactcagcaccgccaccaaggacacctatgacgctcttcacatgcaggccctgccgcctcgg

SEQ ID NO: 127 - DNA, 1452 bp, Artificial Sequence
  source: /note="Description of Artificial Sequence: Synthetic polynucleotide"
atggccctccctgtcaccgccctgctgcttccgctggctcttctgctccacgccgctcggcccgaagtgcaattggtggaaactggaggaggacttgtgcaacctggaggatcattgcggctctcatgcgctgtctccggcttcgccctgtcaaatcacgggatgtcgtgggtcagacgggccccgggaaagggtctggaatgggtgtcggggattgtgtacagcggctccacctactacgccgcttcggtcaagggccgcttcactatttcacgggacaacagccgcaacaccctctatctgcaaatgaactctctccgcccggaggataccgccatctactactgctccgcacacggcggcgaatccgacgtgtggggacagggaaccactgtcaccgtgtcgtccgcatccggtggcggaggatcgggtggccgggcctccgggggcggcggcagcgagactaccctgacccagtcccctgccactctgtccgtgagcccgggagagagagccacccttagctgccgggccagccagagcgtgggctccaacctggcctggtaccagcagaagccaggacagggtcccaggctgctgatctacggagcctccactcgcgcgaccggcatccccgcgaggttctccgggtcgggttccgggaccgagttcaccctgaccatctcctccctccaaccggaggacttcgcggtgtactactgtcagcagtacaacgattggctgcccgtgacatttggacaggggacgaaggtggaaatcaaaaccactaccccagcaccgaggccacccaccccggctcctaccatcgcctcccagcctctgtccctgcgtccggaggcatgtagacccgcagctggtggggccgtgcatacccggggtcttgacttcgcctgcgatatctacatttgggcccctctggctggtacttgcggggtcctgctgctttcactcgtgatcactctttactgtaagcgcggtcggaagaagctgctgtacatctttaagcaacccttcatgaggcctgtgcagactactcaagaggaggacggctgttcatgccggttcccagaggaggaggaaggcggctgcgaactgcgcgtgaaattcagccgcagcgcagatgctccagcctacaagcaggggcagaaccagctctacaacgaactcaatcttggtcggagagaggagtacgacgtgctggacaagcggagaggacgggacccagaaatgggcgggaagccgcgcagaaagaatccccaagagggcctgtacaacgagctccaaaaggataagatggcagaagcctatagcgagattggtatgaaaggggaacgcagaagaggcaaaggccacgacggactgtaccagggactcagcaccgccaccaaggacacctatgacgctcttcacatgcaggccctgccgcctcgg

SEQ ID NO: 128 - DNA, 1455 bp, Artificial Sequence
  source: /note="Description of Artificial Sequence: Synthetic polynucleotide"
atggccctccctgtcaccgccctgctgcttccgctggctcttctgctccacgccgctcggcccgaagtgcaattggtggaatctggtggaggacttgtgcaacctggaggatcactgagactgtcatgcgcggtgtccggttttgccctgagcaatcatgggatgtcgtgggtccggcgcgcccccggaaagggtctggaatgggtgtcgggtatcgtctactccgggagcacttactacgccgcgagcgtgaagggccgcttcaccatttcccgcgataactcccgcaacaccctgtacttgcaaatgaactcgctccggcctgaggacactgccatctactactgctccgcacacggaggagaatccgacgtgtggggccagggaactaccgtgaccgtcagcagcgcctccggcggcgggggctcaggcggacgggctagcggcggcggtggctccgagatcgtgctgacccagtcgcctggcactctctcgctgagccccggggaaagggcaaccctgtcctgtcgggccagccagtccattggatcatcctccctcgcctggtatcagcagaaaccgggacaggctccgcggctgcttatgtatggggccagctcaagagcctccggcattcccgaccggttctccgggtccggttccggcaccgatttcaccctgactatctcgaggctggagccagaggacttcgccgtgtactactgccagcagtacgcggggtccccgccgttcacgttcggacagggaaccaaggtcgagatcaagaccactaccccagcaccgaggccacccaccccggctcctaccatcgcctcccagcctctgtccctgcgtccggaggcatgtagacccgcagctggtggggccgtgcatacccggggtcttgacttcgcctgcgatatctacatttgggcccctctggctggtacttgcggggtcctgctgctttcactcgtgatcactctttactgtaagcgcggtcggaagaagctgctgtacatctttaagcaacccttcatgaggcctgtgcagactactcaagaggaggacggctgttcatgccggttcccagaggaggaggaaggcggctgcgaactgcgcgtgaaattcagccgcagcgcagatgctccagcctacaagcaggggcagaaccagctctacaacgaactcaatcttggtcggagagaggagtacgacgtgctggacaagcggagaggacgggacccagaaatgggcgggaagccgcgcagaaagaatccccaagagggcctgtacaacgagctccaaaaggataagatggcagaagcctatagcgagattggtatgaaaggggaacgcagaagaggcaaaggccacgacggactgtaccagggactcagcaccgccaccaaggacacctatgacgctcttcacatgcaggccctgccgcctcgg

SEQ ID NO: 129 - protein, 243 aa, Artificial Sequence
  source: /note="Description of Artificial Sequence: Synthetic polypeptide"
QVQLQESGPGLVKPSETLSLTCTVSGGSISSSYYYWGWIRQPPGKGLEWIGSIYYSGSAYYNPSLKSRVTISVDTSKNQFSLRLSSVTAADTAVYYCARHWQEWPDAFDIWGQGTMVTVSSGGGGSGGGGSGGGGSETTLTQSPAFMSATPGDKVIISCKASQDIDDAMNWYQQKPGEAPLFIIQSATSPVPGIPPRFSGSGFGTDFSLTINNIESEDAAYYFCLQHDNFPLTFGQGTKLEIK

SEQ ID NO: 130 - protein, 244 aa, Artificial Sequence
  source: /note="Description of Artificial Sequence: Synthetic polypeptide"
VNLRESGPALVKPTQTLTLTCTFSGFSLRTSGMCVSWIRQPPGKALEWLARIDWDEDKFYSTSLKTRLTISKDTSDNQVVLRMTNMDPADTATYYCARSGAGGTSATAFDIWGPGTMVTVSSGGGGSGGGGSGGGGSDIQMTQSPSSLSASVGDRVTITCRASQDIYNNLAWFQLKPGSAPRSLMYAANKSQSGVPSRFSGSASGTDFTLTISSLQPEDFATYYCQHYYRFPYSFGQGTKLEIK

SEQ ID NO: 131 - protein, 246 aa, Artificial Sequence
  source: /note="Description of Artificial Sequence: Synthetic polypeptide"
EVQLVESGGGLVKPGGSLRLSCAASGFTFSSYSMNWVRQAPGKGLEWVSSISSSSSYIYYADSVKGRFTISRDNAKNSLYLQMNSLRAEDTAVYYCAKTIAAVYAFDIWGQGTTVTVSSGGGGSGGGGSGGGGSEIVLTQSPLSLPVTPEEPASISCRSSQSLLHSNGYNYLDWYLQKPGQSPQLLIYLGSNRASGVPDRFSGSGSGTDFTLKISRVEAEDVGVYYCMQALQTPYTFGQGTKLEIK

SEQ ID NO: 132 - protein, 240 aa, Artificial Sequence
  source: /note="Description of Artificial Sequence: Synthetic polypeptide"
EVQLVESGGGLVKPGGSLRLSCAASGFTFSDYYMSWIRQAPGKGLEWVSYISSSGSTIYYADSVKGRFTISRDNAKNSLYLQMNSLRAEDTAVYYCARDLRGAFDIWGQGTMVTVSSGGGGSGGGGSGGGGSSYVLTQSPSVSAAPGYTATISCGGNNIGTKSVHWYQQKPGQAPLLVIRDDSVRPSKIPGRFSGSNSGNMATLTISGVQAGDEADFYCQVWDSDSEHVVFGGGTKLTVL

SEQ ID NO: 133 - protein, 241 aa, Artificial Sequence
  source: /note="Description of Artificial Sequence: Synthetic polypeptide"
QVQLVQSGAEVKKPGASVKVSCKPSGYTVTSHYIHWVRRAPGQGLEWMGMINPSGGVTAYSQTLQGRVTMTSDTSSSTVYMELSSLRSEDTAMYYCAREGSGSGWYFDFWGRGTLVTVSSGGGGSGGGGSGGGGSSYVLTQPPSVSVSPGQTASITCSGDGLSKKYVSWYQQKAGQSPVVLISRDKERPSGIPDRFSGSNSADTATLTISGTQAMDEADYYCQAWDDTTVVFGGGTKLTVL

SEQ ID NO: 134 - protein, 245 aa, Artificial Sequence
  source: /note="Description of Artificial Sequence: Synthetic polypeptide"
QVQLQESGPGLVKPSQTLSLTCTVSGGSISSGGYYWSWIRQHPGKGLEWIGYIYYSGSTYYNPSLKSRVTISVDTSKNQFSLKLSSVTAADTAVYYCARAGIAARLRGAFDIWGQGTMVTVSSGGGGSGGGGSGGGGSDIVMTQSPSSVSASVGDRVIITCRASQGIRNWLAWYQQKPGKAPNLLIYAASNLQSGVPSRFSGSGSGADFTLTISSLQPEDVATYYCQKYNSAPFTFGPGTKVDIK

SEQ ID NO: 135 - protein, 253 aa, Artificial Sequence
  source: /note="Description of Artificial Sequence: Synthetic polypeptide"
QVQLVQSGAEVKKPGSSVKVSCKASGGTFSSYAISWVRQAPGQGLEWMGGIIPIFGTANYAQKFQGRVTITADESTSTAYMELSSLRSEDTAVYYCARRGGYQLLRWDVGLLRSAFDIWGQGTMVTVSSGGGGSGGGGSGGGGSSYVLTQPPSVSVAPGQTARITCGGNNIGSKSVHWYQQKPGQAPVLVLYGKNNRPSGVPDRFSGSRSGTTASLTITGAQAEDEADYYCSSRDSSGDHLRVFGTGTKVTVL

SEQ ID NO: 136 - protein, 248 aa, Artificial Sequence
  source: /note="Description of Artificial Sequence: Synthetic polypeptide"
EVQLQQSGPGLVKPSQTLSLTCAISGDSVSSNSAAWNWIRQSPSRGLEWLGRTYYRSKWYSFYAISLKSRIIINPDTSKNQFSLQLKSVTPEDTAVYYCARSSPEGLFLYWFDPWGQGTLVTVSSGGDGSGGGGSGGGGSSSELTQDPAVSVALGQTIRITCQGDSLGNYYATWYQQKPGQAPVLVIYGTNNRPSGIPDRFSASSSGNTASLTITGAQAEDEADYYCNSRDSSGHHLLFGTGTKVTVL

SEQ ID NO: 137 - protein, 246 aa, Artificial Sequence
  source: /note="Description of Artificial Sequence: Synthetic polypeptide"
EVQLVESGGGLVQPGGSLRLSCAASGFTFSSYAMSWVRQAPGKGLEWVSAISGSGGSTYYADSVKGRFTISRDNSKNTLYLQMNSLRAEDTAVYYCAKVEGSGSLDYWGQGTLVTVSSGGGGSGGGGSGGGGSEIVMTQSPGTLSLSPGERATLSCRASQSVSSAYLAWYQQKPGQPPRLLISGASTRATGIPDRFGGSGSGTDFTLTISRLEPEDFAVYYCQHYGSSFNGSSLFTFGQGTRLEIK

SEQ ID NO: 138 - protein, 241 aa, Artificial Sequence
  source: /note="Description of Artificial Sequence: Synthetic polypeptide"
EVQLVETGGGLVQPGGSLRLSCAASGITFSRYPMSWVRQAPGKGLEWVSGISDSGVSTYYADSAKGRFTISRDNSKNTLFLQMSSLRDEDTAVYYCVTRAGSEASDIWGQGTMVTVSSGGGGSGGGGSGGGGSEIVLTQSPATLSLSPGERATLSCRASQSVSNSLAWYQQKPGQAPRLLIYDASSRATGIPDRFSGSGSGTDFTLTISRLEPEDFAIYYCQQFGTSSGLTFGGGTKLEIK

SEQ ID NO: 139 - protein, 248 aa, Artificial Sequence
  source: /note="Description of Artificial Sequence: Synthetic polypeptide"
QVQLVESGGGLVQPGGSLRLSCAASGFTFSSYAMSWVRQAPGKGLEWVSAISGSGGSTYYADSVKGRFTISRDNAKNSLYLQMNSLRAEDTAIYYCARATYKRELRYYYGMDVWGQGTMVTVSSGGGGSGGGGSGGGGSEIVMTQSPGTVSLSPGERATLSCRASQSVSSSFLAWYQQKPGQAPRLLIYGASSRATGIPDRFSGSGSGTDFTLTISRLEPEDSAVYYCQQYHSSPSWTFGQGTRLEIK

SEQ ID NO: 140 - protein, 248 aa, Artificial Sequence
  source: /note="Description of Artificial Sequence: Synthetic polypeptide"
EVQLVETGGGLVQPGGSLRLSCAASGFTFSSYAMSWVRQAPGKGLEWVSAISGSGGSTYYADSVKGRFTISRDNSKNTLYLQMNTLKAEDTAVYYCARATYKRELRYYYGMDVWGQGTTVTVSSGGGGSGGGGSGGGGSEIVLTQSPSTLSLSPGESATLSCRASQSVSTTFLAWYQQKPGQAPRLLIYGSSNRATGIPDRFSGSGSGTDFTLTIRRLEPEDFAVYYCQQYHSSPSWTFGQGTKVEIK

SEQ ID NO: 141 - protein, 239 aa, Artificial Sequence
  source: /note="Description of Artificial Sequence: Synthetic polypeptide"
EVQLVETGGGLVQPGRSLRLSCAASGFTFDDYAMHWVRQAPGKGLEWVSGISWNSGSIGYADSVKGRFTISRDNAKNSLYLQMNSLRDEDTAVYYCARVGKAVPDVWGQGTTVTVSSGGGGSGGGGSGGGGSDIVMTQTPSSLSASVGDRVTITCRASQSISSYLNWYQQKPGKAPKLLIYAASSLQSGVPSRFSGSGSGTDFTLTISSLQPEDFATYYCQQSYSTPYSFGQGTRLEIK

SEQ ID NO: 142 - protein, 246 aa, Artificial Sequence
  source: /note="Description of Artificial Sequence: Synthetic polypeptide"
EVQLVESGGGLVQPGRSLRLSCTASGFTFDDYAMHWVRQRPGKGLEWVASINWKGNSLAYGDSVKGRFAISRDNAKNTVFLQMNSLRTEDTAVYYCASHQGVAYYNYAMDVWGRGTLVTVSSGGGGSGGGGSGGGGSEIVLTQSPGTLSLSPGERATLSCRATQSIGSSFLAWYQQRPGQAPRLLIYGASQRATGIPDRFSGRGSGTDFTLTISRVEPEDSAVYYCQHYESSPSWTFGQGTKVEIK

SEQ ID NO: 143 - protein, 241 aa, Artificial Sequence
  source: /note="Description of Artificial Sequence: Synthetic polypeptide"
EVQLVESGGGLVQPGGSLRLSCAASGFTFSSYAMSWVRQAPGKGLEWVSAISGSGGSTYYADSVKGRFTISRDNSKNTLYLQMNSLRAEDTAVYYCAKVVRDGMDVWGQGTTVTVSSGGGGSGGGGSGGGGSEIVLTQSPATLSLSPGERATLSCRASQSVSSSYLAWYQQKPGQAPRLLIYGASSRATGIPDRFSGNGSGTDFTLTISRLEPEDFAVYYCQQYGSPPRFTFGPGTKVDIK

SEQ ID NO: 144 - protein, 242 aa, Artificial Sequence
  source: /note="Description of Artificial Sequence: Synthetic polypeptide"
EVQLLESGGGLVQPGGSLRLSCAASGFTFSSYAMSWVRQAPGKGLEWVSAISGSGGSTYYADSVKGRFTISRDNSKNTLYLQMNSLRAEDTAVYYCAKIPQTGTFDYWGQGTLVTVSSGGGGSGGGGSGGGGSEIVLTQSPGTLSLSPGERATLSCRASQSVSSSYLAWYQQRPGQAPRLLIYGASSRATGIPDRFSGSGSGTDFTLTISRLEPEDFAVYYCQHYGSSPSWTFGQGTRLEIK

SEQ ID NO: 145 - protein, 248 aa, Artificial Sequence
  source: /note="Description of Artificial Sequence: Synthetic polypeptide"
EVQLVETGGGLVQPGGSLRLSCAASGFTFSSYAMSWVRQAPGKGLEWVSAISGSGGSTYYADSVKGRFTMSRENDKNSVFLQMNSLRVEDTGVYYCARANYKRELRYYYGMDVWGQGTMVTVSSGGGGSGGGGSGGGGSEIVMTQSPGTLSLSPGESATLSCRASQRVASNYLAWYQHKPGQAPSLLISGASSRATGVPDRFSGSGSGTDFTLAISRLEPEDSAVYYCQHYDSSPSWTFGQGTKVEIK

SEQ ID NO: 146 - protein, 244 aa, Artificial Sequence
  source: /note="Description of Artificial Sequence: Synthetic polypeptide"
EVQLLETGGGLVQPGGSLRLSCAASGFSFSSYAMSWVRQAPGKGLEWVSAISGSGGSTYYADSVKGRFTISRDNSKNTLYLQMNSLRAEDTAVYYCAKALVGATGAFDIWGQGTLVTVSSGGGGSGGGGSGGGGSEIVLTQSPGTLSLSPGERATLSCRASQSLSSNFLAWYQQKPGQAPGLLIYGASNWATGTPDRFSGSGSGTDFTLTITRLEPEDFAVYYCQYYGTSPMYTFGQGTKVEIK

SEQ ID NO: 147 - protein, 244 aa, Artificial Sequence
  source: /note="Description of Artificial Sequence: Synthetic polypeptide"
EVQLLESGGGLVQPGGSLRLSCAASGFTFSSYAMSWVRQAPGKGLEWVSAISGSGGSTYYADSVKGRFTISRDNSKNTLYLQMNSLRAEDTAVYYCVLWFGEGFDPWGQGTLVTVSSGGGGSGGGGSGGGGSDIVLTQSPLSLPVTPGEPASISCRSSQSLLHSNGYNYLDWYLQKPGQSPQLLIYLGSNRASGVPDRFSGSGSGTDFTLKISRVEAEDVGVYYCMQALQTPLTFGGGTKVDIK

SEQ ID NO: 148 - protein, 251 aa, Artificial Sequence
  source: /note="Description of Artificial Sequence: Synthetic polypeptide"
QVQLVESGGGLVQPGGSLRLSCAASGFTFSSYAMSWVRQAPGKGLEWVSAISGSGGSTYYADSVKGRFTISRDNSKNTLYLQMNSLRAEDTAVYYCAKVGYDSSGYYRDYYGMDVWGQGTTVTVSSGGGGSGGGGSGGGGSEIVLTQSPGTLSLSPGERATLSCRASQSVSSSYLAWYQQKPGQAPRLLIYGTSSRATGISDRFSGSGSGTDFTLTISRLEPEDFAVYYCQHYGNSPPKFTFGPGTKLEIK

SEQ ID NO: 149 - protein, 246 aa, Artificial Sequence
  source: /note="Description of Artificial Sequence: Synthetic polypeptide"
EVQLVESGGGLVQPGGSLRLSCAASGFTFSSYAMSWVRQAPGKGLEWVSAISGSGGSTYYADSVKGRFTISRDNSKNTLYLQMNSLRAEDTAVYYCAKMGWSSGYLGAFDIWGQGTTVTVSSGGGGSGGGGSGGGGSEIVLTQSPGTLSLSPGERATLSCRASQSVASSFLAWYQQKPGQAPRLLIYGASGRATGIPDRFSGSGSGTDFTLTISRLEPEDFAVYYCQHYGGSPRLTFGGGTKVDIK

SEQ ID NO: 150 - DNA, 729 bp, Artificial Sequence
  source: /note="Description of Artificial Sequence: Synthetic polynucleotide"
caagtgcagcttcaggaaagcggaccgggcctggtcaagccatccgaaactctctccctgacttgcactgtgtctggcggttccatctcatcgtcgtactactactggggctggattaggcagccgcccggaaagggactggagtggatcggaagcatctactattccggctcggcgtactacaaccctagcctcaagtcgagagtgaccatctccgtggatacctccaagaaccagttttccctgcgcctgagctccgtgaccgccgctgacaccgccgtgtactactgtgctcggcattggcaggaatggcccgatgccttcgacatttggggccagggcactatggtcactgtgtcatccgggggtggaggcagcgggggaggagggtccggggggggaggttcagagacaaccttgacccagtcacccgcattcatgtccgccactccgggagacaaggtcatcatctcgtgcaaagcgtcccaggatatcgacgatgccatgaattggtaccagcagaagcctggcgaagcgccgctgttcattatccaatccgcaacctcgcccgtgcctggaatcccaccgcggttcagcggcagcggtttcggaaccgacttttccctgaccattaacaacattgagtccgaggacgccgcctactacttctgcctgcaacacgacaacttccctctcacgttcggccagggaaccaagctggaaatcaag

SEQ ID NO: 151 - DNA, 735 bp, Artificial Sequence
  source: /note="Description of Artificial Sequence: Synthetic polynucleotide"
caagtcaatctgcgcgaatccggccccgccttggtcaagcctacccagaccctcactctgacctgtactttctccggcttctccctgcggacttccgggatgtgcgtgtcctggatcagacagcctccgggaaaggccctggagtggctcgctcgcattgactgggatgaggacaagttctactccacctcactcaagaccaggctgaccatcagcaaagatacctctgacaaccaagtggtgctccgcatgaccaacatggacccagccgacactgccacttactactgcgcgaggagcggagcgggcggaacctccgccaccgccttcgatatttggggcccgggtaccatggtcaccgtgtcaagcggaggaggggggtccgggggcggcggttccgggggaggcggatcggacattcagatgactcagtcaccatcgtccctgagcgctagcgtgggcgacagagtgacaatcacttgccgggcatcccaggacatctataacaaccttgcgtggttccagctgaagcctggttccgcaccgcggtcacttatgtacgccgccaacaagagccagtcgggagtgccgtcccggttttccggttcggcctcgggaactgacttcaccctgacgatctccagcctgcaacccgaggatttcgccacctactactgccagcactactaccgctttccctactcgttcggacagggaaccaagctggaaatcaag

SEQ ID NO: 152 - DNA, 738 bp, Artificial Sequence
  source: /note="Description of Artificial Sequence: Synthetic polynucleotide"
gaagtgcagcttgtcgaatccggggggggactggtcaagccgggcggatcactgagactgtcctgcgccgcgagcggcttcacgttctcctcctactccatgaactgggtccgccaagcccccgggaagggactggaatgggtgtcctctatctcctcgtcgtcgtcctacatctactacgccgactccgtgaagggaagattcaccatttcccgcgacaacgcaaagaactcactgtacttgcaaatgaactcactccgggccgaagatactgctgtgtactattgcgccaagactattgccgccgtctacgctttcgacatctggggccagggaaccaccgtgactgtgtcgtccggtggtggtggctcgggcggaggaggaagcggcggcggggggtccgagattgtgctgacccagtcgccactgagcctccctgtgacccccgaggaacccgccagcatcagctgccggtccagccagtccctgctccactccaacggatacaattacctcgattggtaccttcagaagcctggacaaagcccgcagctgctcatctacttgggatcaaaccgcgcgtcaggagtgcctgaccggttctccggctcgggcagcggtaccgatttcaccctgaaaatctccagggtggaggcagaggacgtgggagtgtattactgtatgcaggcgctgcagactccgtacacatttgggcagggcaccaagctggagatcaag

SEQ ID NO: 153 - DNA, 720 bp, Artificial Sequence
  source: /note="Description of Artificial Sequence: Synthetic polynucleotide"
gaagtccagctcgtggagtccggcggaggccttgtgaagcctggaggttcgctgagactgtcctgcgccgcctccggcttcaccttctccgactactacatgtcctggatcagacaggccccgggaaagggcctggaatgggtgtcctacatctcgtcatcgggcagcactatctactacgcggactcagtgaaggggcggttcaccatttcccgggataacgcgaagaactcgctgtatctgcaaatgaactcactgagggccgaggacaccgccgtgtactactgcgcccgcgatctccgcggggcatttgacatctggggacagggaaccatggtcacagtgtccagcggagggggaggatcgggtggcggaggttccgggggtggaggctcctcctacgtgctgactcagagcccaagcgtcagcgctgcgcccggttacacggcaaccatctcctgtggcggaaacaacattgggaccaagtctgtgcactggtatcagcagaagccgggccaagctcccctgttggtgatccgcgatgactccgtgcggcctagcaaaattccgggacggttctccggctccaacagcggcaatatggccactctcaccatctcgggagtgcaggccggagatgaagccgacttctactgccaagtctgggactcagactccgagcatgtggtgttcgggggcggaaccaagctgactgtgctc

SEQ ID NO: 154 - DNA, 723 bp, Artificial Sequence
  source: /note="Description of Artificial Sequence: Synthetic polynucleotide"
caagtgcagctggtgcagagcggggccgaagtcaagaagccgggagcctccgtgaaagtgtcctgcaagccttcgggatacaccgtgacctcccactacattcattgggtccgccgcgcccccggccaaggactcgagtggatgggcatgatcaaccctagcggcggagtgaccgcgtacagccagacgctgcagggacgcgtgactatgacctcggatacctcctcctccaccgtctatatggaactgtccagcctgcggtccgaggataccgccatgtactactgcgcccgggaaggatcaggctccgggtggtatttcgacttctggggaagaggcaccctcgtgactgtgtcatctgggggagggggttccggtggtggcggatcgggaggaggcggttcatcctacgtgctgacccagccaccctccgtgtccgtgagccccggccagactgcatcgattacatgtagcggcgacggcctctccaagaaatacgtgtcgtggtaccagcagaaggccggacagagcccggtggtgctgatctcaagagataaggagcggcctagcggaatcccggacaggttctcgggttccaactccgcggacactgctactctgaccatctcggggacccaggctatggacgaagccgattactactgccaagcctgggacgacactactgtcgtgtttggagggggcaccaagttgaccgtcctt

SEQ ID NO: 155 - DNA, 735 bp, Artificial Sequence
  source: /note="Description of Artificial Sequence: Synthetic polynucleotide"
caagtgcagcttcaggagagcggcccgggactcgtgaagccgtcccagaccctgtccctgacttgcaccgtgtcgggaggaagcatctcgagcggaggctactattggtcgtggattcggcagcaccctggaaagggcctggaatggatcggctacatctactactccggctcgacctactacaacccatcgctgaagtccagagtgacaatctcagtggacacgtccaagaatcagttcagcctgaagctctcttccgtgactgcggccgacaccgccgtgtactactgcgcacgcgctggaattgccgcccggctgaggggtgccttcgacatttggggacagggcaccatggtcaccgtgtcctccggcggcggaggttccgggggtggaggctcaggaggaggggggtccgacatcgtcatgactcagtcgccctcaagcgtcagcgcgtccgtcggggacagagtgatcatcacctgtcgggcgtcccagggaattcgcaactggctggcctggtatcagcagaagcccggaaaggcccccaacctgttgatctacgccgcctcaaacctccaatccggggtgccgagccgcttcagcggctccggttcgggtgccgatttcactctgaccatctcctccctgcaacctgaagatgtggctacctactactgccaaaagtacaactccgcaccttttactttcggaccggggaccaaagtggacattaag

SEQ ID NO: 156 - DNA, 759 bp, Artificial Sequence
  source: /note="Description of Artificial Sequence: Synthetic polynucleotide"
caagtgcagctggtccagtcgggcgccgaggtcaagaagcccgggagctctgtgaaagtgtcctgcaaggcctccgggggcacctttagctcctacgccatctcctgggtccgccaagcaccgggtcaaggcctggagtggatggggggaattatccctatcttcggcactgccaactacgcccagaagttccagggacgcgtgaccattaccgcggacgaatccacctccaccgcttatatggagctgtccagcttgcgctcggaagataccgccgtgtactactgcgcccggaggggtggataccagctgctgagatgggacgtgggcctcctgcggtcggcgttcgacatctggggccagggcactatggtcactgtgtccagcggaggaggcggatcgggaggcggcggatcagggggaggcggttccagctacgtgcttactcaacccccttcggtgtccgtggccccgggacagaccgccagaatcacttgcggaggaaacaacattgggtccaagagcgtgcattggtaccagcagaagccaggacaggcccctgtgctggtgctctacgggaagaacaatcggcccagcggagtgccggacaggttctcgggttcacgctccggtacaaccgcttcactgactatcaccggggcccaggcagaggatgaagcggactactactgttcctcccgggattcatccggcgaccacctccgggtgttcggaaccggaacgaaggtcaccgtgctg

SEQ ID NO: 157 - DNA, 744 bp, Artificial Sequence
  source: /note="Description of Artificial Sequence: Synthetic polynucleotide"
gaagtgcagctccaacagtcaggaccggggctcgtgaagccatcccagaccctgtccctgacttgtgccatctcgggagatagcgtgtcatcgaactccgccgcctggaactggattcggcagagcccgtcccgcggactggagtggcttggaaggacctactaccggtccaagtggtactctttctacgcgatctcgctgaagtcccgcattatcattaaccctgatacctccaagaatcagttctccctccaactgaaatccgtcacccccgaggacacagcagtgtattactgcgcacggagcagccccgaaggactgttcctgtattggtttgacccctggggccaggggactcttgtgaccgtgtcgagcggcggagatgggtccggtggcggtggttcggggggcggcggatcatcatccgaactgacccaggacccggctgtgtccgtggcgctgggacaaaccatccgcattacgtgccagggagactccctgggcaactactacgccacttggtaccagcagaagccgggccaagcccctgtgttggtcatctacgggaccaacaacagaccttccggcatccccgaccggttcagcgcttcgtcctccggcaacactgccagcctgaccatcactggagcgcaggccgaagatgaggccgactactactgcaacagcagagactcctcgggtcatcacctcttgttcggaactggaaccaaggtcaccgtgctg

SEQ ID NO: 158 - DNA, 738 bp, Artificial Sequence
  source: /note="Description of Artificial Sequence: Synthetic polynucleotide"
gaagtgcagctcgtggagtcaggaggcggcctggtccagccgggagggtcccttagactgtcatgcgccgcaagcggattcactttctcctcctatgccatgagctgggtccgccaagcccccggaaagggactggaatgggtgtccgccatctcggggtctggaggctcaacttactacgctgactccgtgaagggacggttcaccattagccgcgacaactccaagaacaccctctacctccaaatgaactccctgcgggccgaggataccgccgtctactactgcgccaaagtggaaggttcaggatcgctggactactggggacagggtactctcgtgaccgtgtcatcgggcggaggaggttccggcggtggcggctccggcggcggagggtcggagatcgtgatgacccagagccctggtactctgagcctttcgccgggagaaagggccaccctgtcctgccgcgcttcccaatccgtgtcctccgcgtacttggcgtggtaccagcagaagccgggacagccccctcggctgctgatcagcggggccagcacccgggcaaccggaatcccagacagattcgggggttccggcagcggcacagatttcaccctgactatttcgaggttggagcccgaggactttgcggtgtattactgtcagcactacgggtcgtcctttaatggctccagcctgttcacgttcggacaggggacccgcctggaaatcaag

SEQ ID NO: 159 - DNA, 723 bp, Artificial Sequence
  source: /note="Description of Artificial Sequence: Synthetic polynucleotide"
gaagtgcaactggtggaaaccggtggcggcctggtgcagcctggaggatcattgaggctgtcatgcgcggccagcggtattaccttctcccggtaccccatgtcctgggtcagacaggccccggggaaagggcttgaatgggtgtccgggatctcggactccggtgtcagcacttactacgccgactccgccaagggacgcttcaccatttcccgggacaactcgaagaacaccctgttcctccaaatgagctccctccgggacgaggatactgcagtgtactactgcgtgacccgcgccgggtccgaggcgtctgacatttggggacagggcactatggtcaccgtgtcgtccggcggagggggctcgggaggcggtggcagcggaggaggagggtccgagatcgtgctgacccaatccccggccaccctctcgctgagccctggagaaagggcaaccttgtcctgtcgcgcgagccagtccgtgagcaactccctggcctggtaccagcagaagcccggacaggctccgagacttctgatctacgacgcttcgagccgggccactggaatccccgaccgcttttcggggtccggctcaggaaccgatttcaccctgacaatctcacggctggagccagaggatttcgccatctattactgccagcagttcggtacttcctccggcctgactttcggaggcggcacgaagctcgaaatcaag

SEQ ID NO: 160 - DNA, 744 bp, Artificial Sequence
  source: /note="Description of Artificial Sequence: Synthetic polynucleotide"
caagtgcagctcgtggaatcgggtggcggactggtgcagccggggggctcacttagactgtcctgcgcggccagcggattcactttctcctcctacgccatgtcctgggtcagacaggcccctggaaagggcctggaatgggtgtccgcaatcagcggcagcggcggctcgacctattacgcggattcagtgaagggcagattcaccatttcccgggacaacgccaagaactccttgtaccttcaaatgaactccctccgcgcggaagataccgcaatctactactgcgctcgggccacttacaagagggaactgcgctactactacgggatggacgtctggggccagggaaccatggtcaccgtgtccagcggaggaggaggatcgggaggaggcggtagcgggggtggagggtcggagatcgtgatgacccagtcccccggcactgtgtcgctgtcccccggcgaacgggccaccctgtcatgtcgggccagccagtcagtgtcgtcaagcttcctcgcctggtaccagcagaaaccgggacaagctccccgcctgctgatctacggagccagcagccgggccaccggtattcctgaccggttctccggttcggggtccgggaccgactttactctgactatctctcgcctcgagccagaggactccgccgtgtattactgccagcagtaccactcctccccgtcctggacgttcggacagggcacaaggctggagattaag

SEQ ID NO: 161 - DNA, 744 bp, Artificial Sequence
  source: /note="Description of Artificial Sequence: Synthetic polynucleotide"
gaggtgcagcttgtggaaaccggtggcggactggtgcagcccggaggaagcctcaggctgtcctgcgccgcgtccggcttcaccttctcctcgtacgccatgtcctgggtccgccaggcccccggaaagggcctggaatgggtgtccgccatctctggaagcggaggttccacgtactacgcggacagcgtcaagggaaggttcacaatctcccgcgataattcgaagaacactctgtaccttcaaatgaacaccctgaaggccgaggacactgctgtgtactactgcgcacgggccacctacaagagagagctccggtactactacggaatggacgtctggggccagggaactactgtgaccgtgtcctcgggagggggtggctccggggggggcggctccggcggaggcggttccgagattgtgctgacccagtcaccttcaactctgtcgctgtccccgggagagagcgctactctgagctgccgggccagccagtccgtgtccaccaccttcctcgcctggtatcagcagaagccggggcaggcaccacggctcttgatctacgggtcaagcaacagagcgaccggaattcctgaccgcttctcggggagcggttcaggcaccgacttcaccctgactatccggcgcctggaacccgaagatttcgccgtgtattactgtcaacagtaccactcctcgccgtcctggacctttggccaaggaaccaaagtggaaatcaag

SEQ ID NO: 162 - DNA, 717 bp, Artificial Sequence
  source: /note="Description of Artificial Sequence: Synthetic polynucleotide"
gaagtgcagctcgtggaaactggaggtggactcgtgcagcctggacggtcgctgcggctgagctgcgctgcatccggcttcaccttcgacgattatgccatgcactgggtcagacaggcgccagggaagggacttgagtgggtgtccggtatcagctggaatagcggctcaatcggatacgcggactccgtgaagggaaggttcaccatttcccgcgacaacgccaagaactccctgtacttgcaaatgaacagcctccgggatgaggacactgccgtgtactactgcgcccgcgtcggaaaagctgtgcccgacgtctggggccagggaaccactgtgaccgtgtccagcggcgggggtggatcgggcggtggagggtccggtggagggggctcagatattgtgatgacccagaccccctcgtccctgtccgcctcggtcggcgaccgcgtgactatcacatgtagagcctcgcagagcatctccagctacctgaactggtatcagcagaagccggggaaggccccgaagctcctgatctacgcggcatcatcactgcaatcgggagtgccgagccggttttccgggtccggctccggcaccgacttcacgctgaccatttcttccctgcaacccgaggacttcgccacttactactgccagcagtcctactccaccccttactccttcggccaaggaaccaggctggaaatcaag

SEQ ID NO: 163 - DNA, 738 bp, Artificial Sequence
  source: /note="Description of Artificial Sequence: Synthetic polynucleotide"
gaagtgcagctcgtggagagcgggggaggattggtgcagcccggaaggtccctgcggctctcctgcactgcgtctggcttcaccttcgacgactacgcgatgcactgggtcagacagcgcccgggaaagggcctggaatgggtcgcctcaatcaactggaagggaaactccctggcctatggcgacagcgtgaagggccgcttcgccatttcgcgcgacaacgccaagaacaccgtgtttctgcaaatgaattccctgcggaccgaggataccgctgtgtactactgcgccagccaccagggcgtggcatactataactacgccatggacgtgtggggaagagggacgctcgtcaccgtgtcctccgggggcggtggatcgggtggaggaggaagcggtggcgggggcagcgaaatcgtgctgactcagagcccgggaactctttcactgtccccgggagaacgggccactctctcgtgccgggccacccagtccatcggctcctccttccttgcctggtaccagcagaggccaggacaggcgccccgcctgctgatctacggtgcttcccaacgcgccactggcattcctgaccggttcagcggcagagggtcgggaaccgatttcacactgaccatttcccgggtggagcccgaagattcggcagtctactactgtcagcattacgagtcctccccttcatggaccttcggtcaagggaccaaagtggagatcaag

SEQ ID NO: 164 - DNA, 723 bp, Artificial Sequence
  source: /note="Description of Artificial Sequence: Synthetic polynucleotide"
gaggtgcagttggtcgaaagcgggggcgggcttgtgcagcctggcggatcactgcggctgtcctgcgcggcatcaggcttcacgttttcttcctacgccatgtcctgggtgcgccaggcccctggaaagggactggaatgggtgtccgcgatttcggggtccggcgggagcacctactacgccgattccgtgaagggccgcttcactatctcgcgggacaactccaagaacaccctctacctccaaatgaatagcctgcgggccgaggataccgccgtctactattgcgctaaggtcgtgcgcgacggaatggacgtgtggggacagggtaccaccgtgacagtgtcctcggggggaggcggtagcggcggaggaggaagcggtggtggaggttccgagattgtgctgactcaatcacccgcgaccctgagcctgtcccccggcgaaagggccactctgtcctgtcgggccagccaatcagtctcctcctcgtacctggcctggtaccagcagaagccaggacaggctccgagactccttatctatggcgcatcctcccgcgccaccggaatcccggataggttctcgggaaacggatcggggaccgacttcactctcaccatctcccggctggaaccggaggacttcgccgtgtactactgccagcagtacggcagcccgcctagattcactttcggccccggcaccaaagtggacatcaag

SEQ ID NO: 165 - DNA, 726 bp, Artificial Sequence
  source: /note="Description of Artificial Sequence: Synthetic polynucleotide"
gaagtgcagctgctggagtccggcggtggattggtgcaaccggggggatcgctcagactgtcctgtgcggcgtcaggcttcaccttctcgagctacgccatgtcatgggtcagacaggcccctggaaagggtctggaatgggtgtccgccatttccgggagcgggggatctacatactacgccgatagcgtgaagggccgcttcaccatttcccgggacaactccaagaacactctctatctgcaaatgaactccctccgcgctgaggacactgccgtgtactactgcgccaaaatccctcagaccggcaccttcgactactggggacaggggactctggtcaccgtcagcagcggtggcggaggttcggggggaggaggaagcggcggcggagggtccgagattgtgctgacccagtcacccggcactttgtccctgtcgcctggagaaagggccaccctttcctgccgggcatcccaatccgtgtcctcctcgtacctggcctggtaccagcagaggcccggacaggccccacggcttctgatctacggagcaagcagccgcgcgaccggtatcccggaccggttttcgggctcgggctcaggaactgacttcaccctcaccatctcccgcctggaacccgaagatttcgctgtgtattactgccagcactacggcagctccccgtcctggacgttcggccagggaactcggctggagatcaag

SEQ ID NO: 166 - DNA, 744 bp, Artificial Sequence
  source: /note="Description of Artificial Sequence: Synthetic polynucleotide"
gaagtgcaactggtggaaaccggtggaggactcgtgcagcctggcggcagcctccggctgagctgcgccgcttcgggattcaccttttcctcctacgcgatgtcttgggtcagacaggcccccggaaaggggctggaatgggtgtcagccatctccggctccggcggatcaacgtactacgccgactccgtgaaaggccggttcaccatgtcgcgcgagaatgacaagaactccgtgttcctgcaaatgaactccctgagggtggaggacaccggagtgtactattgtgcgcgcgccaactacaagagagagctgcggtactactacggaatggacgtctggggacagggaactatggtgaccgtgtcatccggtggagggggaagcggcggtggaggcagcgggggcgggggttcagaaattgtcatgacccagtccccgggaactctttccctctcccccggggaatccgcgactttgtcctgccgggccagccagcgcgtggcctcgaactacctcgcatggtaccagcataagccaggccaagccccttccctgctgatttccggggctagcagccgcgccactggcgtgccggataggttctcgggaagcggctcgggtaccgatttcaccctggcaatctcgcggctggaaccggaggattcggccgtgtactactgccagcactatgactcatccccctcctggacattcggacagggcaccaaggtcgagatcaag

SEQ ID NO: 167 - DNA, 732 bp, Artificial Sequence
  source: /note="Description of Artificial Sequence: Synthetic polynucleotide"
gaagtgcagctgctcgaaaccggtggagggctggtgcagccagggggctccctgaggctttcatgcgccgctagcggattctccttctcctcttacgccatgtcgtgggtccgccaagcccctggaaaaggcctggaatgggtgtccgcgatttccgggagcggaggttcgacctattacgccgactccgtgaagggccgctttaccatctcccgggataactccaagaacactctgtacctccaaatgaactcgctgagagccgaggacaccgccgtgtattactgcgcgaaggcgctggtcggcgcgactggggcattcgacatctggggacagggaactcttgtgaccgtgtcgagcggaggcggcggctccggcggaggagggagcgggggcggtggttccgaaatcgtgttgactcagtccccgggaaccctgagcttgtcacccggggagcgggccactctctcctgtcgcgcctcccaatcgctctcatccaatttcctggcctggtaccagcagaagcccggacaggccccgggcctgctcatctacggcgcttcaaactgggcaacgggaacccctgatcggttcagcggaagcggatcgggtactgactttaccctgaccatcaccagactggaaccggaggacttcgccgtgtactactgccagtactacggcacctcccccatgtacacattcggacagggtaccaaggtcgagattaag

SEQ ID NO: 168 - DNA, 733 bp, Artificial Sequence
  source: /note="Description of Artificial Sequence: Synthetic polynucleotide"
gaagtgcagctgcttgagagcggtggaggtctggtgcagcccgggggatcactgcgcctgtcctgtgccgcgtccggtttcactttctcctcgtacgccatgtcgtgggtcagacaggcaccgggaaagggactggaatgggtgtcagccatttcgggttcggggggcagcacctactacgctgactccgtgaagggccggttcaccatttcccgcgacaactccaagaacaccttgtacctccaaatgaactccctgcgggccgaagataccgccgtgtattactgcgtgctgtggttcggagagggattcgacccgtggggacaaggaacactcgtgactgtgtcatccggcggaggcggcagcggtggcggcggttccggcggcggcggatctgacatcgtgttgacccagtcccctctgagcctgccggtcactcctggcgaaccagccagcatctcctgccggtcgagccagtccctcctgcactccaatgggtacaactacctcgattggtatctgcaaaagccgggccagagcccccagctgctgatctaccttgggtcaaaccgcgcttccggggtgcctgatagattctccgggtccgggagcggaaccgactttaccctgaaaatctcgagggtggaggccgaggacgtcggagtgtactactgcatgcaggcgctccagactcccctgaccttcggaggaggaacgaaggtcgacatcaaga

SEQ ID NO: 169 - DNA, 753 bp, Artificial Sequence
  source: /note="Description of Artificial Sequence: Synthetic polynucleotide"
caagtgcagctcgtggagtcaggcggaggactggtgcagcccgggggctccctgagactttcctgcgcggcatcgggttttaccttctcctcctatgctatgtcctgggtgcgccaggccccgggaaagggactggaatgggtgtccgcaatcagcggtagcgggggctcaacatactacgccgactccgtcaagggtcgcttcactatttcccgggacaactccaagaataccctgtacctccaaatgaacagcctcagggccgaggatactgccgtgtactactgcgccaaagtcggatacgatagctccggttactaccgggactactacggaatggacgtgtggggacagggcaccaccgtgaccgtgtcaagcggcggaggcggttcaggagggggaggctccggcggtggagggtccgaaatcgtcctgactcagtcgcctggcactctgtcgttgtccccgggggagcgcgctaccctgtcgtgtcgggcgtcgcagtccgtgtcgagctcctacctcgcgtggtaccagcagaagcccggacaggcccctagacttctgatctacggcacttcttcacgcgccaccgggatcagcgacaggttcagcggctccggctccgggaccgacttcaccctgaccattagccggctggagcctgaagatttcgccgtgtattactgccaacactacggaaactcgccgccaaagttcacgttcggacccggaaccaagctggaaatcaag

SEQ ID NO: 170 - DNA, 739 bp, Artificial Sequence
  source: /note="Description of Artificial Sequence: Synthetic polynucleotide"
gaagtccaactggtggagtccgggggagggctcgtgcagcccggaggcagccttcggctgtcgtgcgccgcctccgggttcacgttctcatcctacgcgatgtcgtgggtcagacaggcaccaggaaagggactggaatgggtgtccgccattagcggctccggcggtagcacctactatgccgactcagtgaagggaaggttcactatctcccgcgacaacagcaagaacaccctgtacctccaaatgaactctctgcgggccgaggataccgcggtgtactattgcgccaagatgggttggtccagcggatacttgggagccttcgacatttggggacagggcactactgtgaccgtgtcctccgggggtggcggatcgggaggcggcggctcgggtggagggggttccgaaatcgtgttgacccagtcaccgggaaccctctcgctgtccccgggagaacgggctacactgtcatgtagagcgtcccagtccgtggcttcctcgttcctggcctggtaccagcagaagccgggacaggcaccccgcctgctcatctacggagccagcggccgggcgaccggcatccctgaccgcttctccggttccggctcgggcaccgactttactctgaccattagcaggcttgagcccgaggattttgccgtgtactactgccaacactacggggggagccctcgcctgaccttcggaggcggaactaaggtcgatatcaaaa

SEQ ID NO: 171 - protein, 121 aa, Artificial Sequence
  source: /note="Description of Artificial Sequence: Synthetic polypeptide"
QVQLQESGPGLVKPSETLSLTCTVSGGSISSSYYYWGWIRQPPGKGLEWIGSIYYSGSAYYNPSLKSRVTISVDTSKNQFSLRLSSVTAADTAVYYCARHWQEWPDAFDIWGQGTMVTVSS

SEQ ID NO: 172 - protein, 123 aa, Artificial Sequence
  source: /note="Description of Artificial Sequence: Synthetic polypeptide"
QVNLRESGPALVKPTQTLTLTCTFSGFSLRTSGMCVSWIRQPPGKALEWLARIDWDEDKFYSTSLKTRLTISKDTSDNQVVLRMTNMDPADTATYYCARSGAGGTSATAFDIWGPGTMVTVSS

SEQ ID NO: 173 - protein, 119 aa, Artificial Sequence
  source: /note="Description of Artificial Sequence: Synthetic polypeptide"
EVQLVESGGGLVKPGGSLRLSCAASGFTFSSYSMNWVRQAPGKGLEWVSSISSSSSYIYYADSVKGRFTISRDNAKNSLYLQMNSLRAEDTAVYYCAKTIAAVYAFDIWGQGTTVTVSS

SEQ ID NO: 174 - protein, 117 aa, Artificial Sequence
  source: /note="Description of Artificial Sequence: Synthetic polypeptide"
EVQLVESGGGLVKPGGSLRLSCAASGFTFSDYYMSWIRQAPGKGLEWVSYISSSGSTIYYADSVKGRFTISRDNAKNSLYLQMNSLRAEDTAVYYCARDLRGAFDIWGQGTMVTVSS

SEQ ID NO: 175 - protein, 120 aa, Artificial Sequence
  source: /note="Description of Artificial Sequence: Synthetic polypeptide"
QVQLVQSGAEVKKPGASVKVSCKPSGYTVTSHYIHWVRRAPGQGLEWMGMINPSGGVTAYSQTLQGRVTMTSDTSSSTVYMELSSLRSEDTAMYYCAREGSGSGWYFDFWGRGTLVTVSS

SEQ ID NO: 176 - protein, 123 aa, Artificial Sequence
  source: /note="Description of Artificial Sequence: Synthetic polypeptide"
QVQLQESGPGLVKPSQTLSLTCTVSGGSISSGGYYWSWIRQHPGKGLEWIGYIYYSGSTYYNPSLKSRVTISVDTSKNQFSLKLSSVTAADTAVYYCARAGIAARLRGAFDIWGQGTMVTVSS

SEQ ID NO: 177 - protein, 129 aa, Artificial Sequence
  source: /note="Description of Artificial Sequence: Synthetic polypeptide"
QVQLVQSGAEVKKPGSSVKVSCKASGGTFSSYAISWVRQAPGQGLEWMGGIIPIFGTANYAQKFQGRVTITADESTSTAYMELSSLRSEDTAVYYCARRGGYQLLRWDVGLLRSAFDIWGQGTMVTVSS

SEQ ID NO: 178 - protein, 125 aa, Artificial Sequence
  source: /note="Description of Artificial Sequence: Synthetic polypeptide"
EVQLQQSGPGLVKPSQTLSLTCAISGDSVSSNSAAWNWIRQSPSRGLEWLGRTYYRSKWYSFYAISLKSRIIINPDTSKNQFSLQLKSVTPEDTAVYYCARSSPEGLFLYWFDPWGQGTLVTVSS

SEQ ID NO: 179 - protein, 118 aa, Artificial Sequence
  source: /note="Description of Artificial Sequence: Synthetic polypeptide"
EVQLVESGGGLVQPGGSLRLSCAASGFTFSSYAMSWVRQAPGKGLEWVSAISGSGGSTYYADSVKGRFTISRDNSKNTLYLQMNSLRAEDTAVYYCAKVEGSGSLDYWGQGTLVTVSS

SEQ ID NO: 180 - protein, 118 aa, Artificial Sequence
  source: /note="Description of Artificial Sequence: Synthetic polypeptide"
EVQLVETGGGLVQPGGSLRLSCAASGITFSRYPMSWVRQAPGKGLEWVSGISDSGVSTYYADSAKGRFTISRDNSKNTLFLQMSSLRDEDTAVYYCVTRAGSEASDIWGQGTMVTVSS

SEQ ID NO: 181 - protein, 124 aa, Artificial Sequence
  source: /note="Description of Artificial Sequence: Synthetic polypeptide"
QVQLVESGGGLVQPGGSLRLSCAASGFTFSSYAMSWVRQAPGKGLEWVSAISGSGGSTYYADSVKGRFTISRDNAKNSLYLQMNSLRAEDTAIYYCARATYKRELRYYYGMDVWGQGTMVTVSS

SEQ ID NO: 182 - protein, 124 aa, Artificial Sequence
  source: /note="Description of Artificial Sequence: Synthetic polypeptide"
EVQLVETGGGLVQPGGSLRLSCAASGFTFSSYAMSWVRQAPGKGLEWVSAISGSGGSTYYADSVKGRFTISRDNSKNTLYLQMNTLKAEDTAVYYCARATYKRELRYYYGMDVWGQGTTVTVSS

SEQ ID NO: 183 - protein, 117 aa, Artificial Sequence
  source: /note="Description of Artificial Sequence: Synthetic polypeptide"
EVQLVETGGGLVQPGRSLRLSCAASGFTFDDYAMHWVRQAPGKGLEWVSGISWNSGSIGYADSVKGRFTISRDNAKNSLYLQMNSLRDEDTAVYYCARVGKAVPDVWGQGTTVTVSS

SEQ ID NO: 184 - protein, 122 aa, Artificial Sequence
  source: /note="Description of Artificial Sequence: Synthetic polypeptide"
EVQLVESGGGLVQPGRSLRLSCTASGFTFDDYAMHWVRQRPGKGLEWVASINWKGNSLAYGDSVKGRFAISRDNAKNTVFLQMNSLRTEDTAVYYCASHQGVAYYNYAMDVWGRGTLVTVSS

SEQ ID NO: 185 - protein, 117 aa, Artificial Sequence
  source: /note="Description of Artificial Sequence: Synthetic polypeptide"
EVQLVESGGGLVQPGGSLRLSCAASGFTFSSYAMSWVRQAPGKGLEWVSAISGSGGSTYYADSVKGRFTISRDNSKNTLYLQMNSLRAEDTAVYYCAKVVRDGMDVWGQGTTVTVSS

SEQ ID NO: 186 - protein, 118 aa, Artificial Sequence
  source: /note="Description of Artificial Sequence: Synthetic polypeptide"
EVQLLESGGGLVQPGGSLRLSCAASGFTFSSYAMSWVRQAPGKGLEWVSAISGSGGSTYYADSVKGRFTISRDNSKNTLYLQMNSLRAEDTAVYYCAKIPQTGTFDYWGQGTLVTVSS

SEQ ID NO: 187 - protein, 124 aa, Artificial Sequence
  source: /note="Description of Artificial Sequence: Synthetic polypeptide"
EVQLVETGGGLVQPGGSLRLSCAASGFTFSSYAMSWVRQAPGKGLEWVSAISGSGGSTYYADSVKGRFTMSRENDKNSVFLQMNSLRVEDTGVYYCARANYKRELRYYYGMDVWGQGTMVTVSS

SEQ ID NO: 188 - protein, 120 aa, Artificial Sequence
  source: /note="Description of Artificial Sequence: Synthetic polypeptide"
EVQLLETGGGLVQPGGSLRLSCAASGFSFSSYAMSWVRQAPGKGLEWVSAISGSGGSTYYADSVKGRFTISRDNSKNTLYLQMNSLRAEDTAVYYCAKALVGATGAFDIWGQGTLVTVSS

SEQ ID NO: 189 - protein, 117 aa, Artificial Sequence
  source: /note="Description of Artificial Sequence: Synthetic polypeptide"
EVQLLESGGGLVQPGGSLRLSCAASGFTFSSYAMSWVRQAPGKGLEWVSAISGSGGSTYYADSVKGRFTISRDNSKNTLYLQMNSLRAEDTAVYYCVLWFGEGFDPWGQGTLVTVSS

SEQ ID NO: 190 - protein, 126 aa, Artificial Sequence
  source: /note="Description of Artificial Sequence: Synthetic polypeptide"
QVQLVESGGGLVQPGGSLRLSCAASGFTFSSYAMSWVRQAPGKGLEWVSAISGSGGSTYYADSVKGRFTISRDNSKNTLYLQMNSLRAEDTAVYYCAKVGYDSSGYYRDYYGMDVWGQGTTVTVSS

SEQ ID NO: 191 - protein, 122 aa, Artificial Sequence
  source: /note="Description of Artificial Sequence: Synthetic polypeptide"
EVQLVESGGGLVQPGGSLRLSCAASGFTFSSYAMSWVRQAPGKGLEWVSAISGSGGSTYYADSVKGRFTISRDNSKNTLYLQMNSLRAEDTAVYYCAKMGWSSGYLGAFDIWGQGTTVTVSS

SEQ ID NO: 192 - protein, 107 aa, Artificial Sequence
  source: /note="Description of Artificial Sequence: Synthetic polypeptide"
ETTLTQSPAFMSATPGDKVIISCKASQDIDDAMNWYQQKPGEAPLFIIQSATSPVPGIPPRFSGSGFGTDFSLTINNIESEDAAYYFCLQHDNFPLTFGQGTKLEIK

SEQ ID NO: 193 - protein, 107 aa, Artificial Sequence
  source: /note="Description of Artificial Sequence: Synthetic polypeptide"
DIQMTQSPSSLSASVGDRVTITCRASQDIYNNLAWFQLKPGSAPRSLMYAANKSQSGVPSRFSGSASGTDFTLTISSLQPEDFATYYCQHYYRFPYSFGQGTKLEIK

SEQ ID NO: 194 - protein, 112 aa, Artificial Sequence
  source: /note="Description of Artificial Sequence: Synthetic polypeptide"
EIVLTQSPLSLPVTPEEPASISCRSSQSLLHSNGYNYLDWYLQKPGQSPQLLIYLGSNRASGVPDRFSGSGSGTDFTLKISRVEAEDVGVYYCMQALQTPYTFGQGTKLEIK

SEQ ID NO: 195 - protein, 108 aa, Artificial Sequence
  source: /note="Description of Artificial Sequence: Synthetic polypeptide"
SYVLTQSPSVSAAPGYTATISCGGNNIGTKSVHWYQQKPGQAPLLVIRDDSVRPSKIPGRFSGSNSGNMATLTISGVQAGDEADFYCQVWDSDSEHVVFGGGTKLTVL

SEQ ID NO: 196 - protein, 106 aa, Artificial Sequence
  source: /note="Description of Artificial Sequence: Synthetic polypeptide"
SYVLTQPPSVSVSPGQTASITCSGDGLSKKYVSWYQQKAGQSPVVLISRDKERPSGIPDRFSGSNSADTATLTISGTQAMDEADYYCQAWDDTTVVFGGGTKLTVL

SEQ ID NO: 197 - protein, 107 aa, Artificial Sequence
  source: /note="Description of Artificial Sequence: Synthetic polypeptide"
DIVMTQSPSSVSASVGDRVIITCRASQGIRNWLAWYQQKPGKAPNLLIYAASNLQSGVPSRFSGSGSGADFTLTISSLQPEDVATYYCQKYNSAPFTFGPGTKVDIK

SEQ ID NO: 198 - protein, 109 aa, Artificial Sequence
  source: /note="Description of Artificial Sequence: Synthetic polypeptide"
SYVLTQPPSVSVAPGQTARITCGGNNIGSKSVHWYQQKPGQAPVLVLYGKNNRPSGVPDRFSGSRSGTTASLTITGAQAEDEADYYCSSRDSSGDHLRVFGTGTKVTVL

SEQ ID NO: 199 - protein, 108 aa, Artificial Sequence
  source: /note="Description of Artificial Sequence: Synthetic polypeptide"
SSELTQDPAVSVALGQTIRITCQGDSLGNYYATWYQQKPGQAPVLVIYGTNNRPSGIPDRFSASSSGNTASLTITGAQAEDEADYYCNSRDSSGHHLLFGTGTKVTVL

SEQ ID NO: 200 - protein, 113 aa, Artificial Sequence
  source: /note="Description of Artificial Sequence: Synthetic polypeptide"
EIVMTQSPGTLSLSPGERATLSCRASQSVSSAYLAWYQQKPGQPPRLLISGASTRATGIPDRFGGSGSGTDFTLTISRLEPEDFAVYYCQHYGSSFNGSSLFTFGQGTRLEIK

SEQ ID NO: 201 - protein, 108 aa, Artificial Sequence
  source: /note="Description of Artificial Sequence: Synthetic polypeptide"
EIVLTQSPATLSLSPGERATLSCRASQSVSNSLAWYQQKPGQAPRLLIYDASSRATGIPDRFSGSGSGTDFTLTISRLEPEDFAIYYCQQFGTSSGLTFGGGTKLEIK

SEQ ID NO: 202 - protein, 109 aa, Artificial Sequence
  source: /note="Description of Artificial Sequence: Synthetic polypeptide"
EIVMTQSPGTVSLSPGERATLSCRASQSVSSSFLAWYQQKPGQAPRLLIYGASSRATGIPDRFSGSGSGTDFTLTISRLEPEDSAVYYCQQYHSSPSWTFGQGTRLEIK

SEQ ID NO: 203 - protein, 109 aa, Artificial Sequence
  source: /note="Description of Artificial Sequence: Synthetic polypeptide"
EIVLTQSPSTLSLSPGESATLSCRASQSVSTTFLAWYQQKPGQAPRLLIYGSSNRATGIPDRFSGSGSGTDFTLTIRRLEPEDFAVYYCQQYHSSPSWTFGQGTKVEIK

SEQ ID NO: 204 - protein, 107 aa, Artificial Sequence
  source: /note="Description of Artificial Sequence: Synthetic polypeptide"
DIVMTQTPSSLSASVGDRVTITCRASQSISSYLNWYQQKPGKAPKLLIYAASSLQSGVPSRFSGSGSGTDFTLTISSLQPEDFATYYCQQSYSTPYSFGQGTRLEIK

SEQ ID NO: 205 - protein, 109 aa, Artificial Sequence
  source: /note="Description of Artificial Sequence: Synthetic polypeptide"
EIVLTQSPGTLSLSPGERATLSCRATQSIGSSFLAWYQQRPGQAPRLLIYGASQRATGIPDRFSGRGSGTDFTLTISRVEPEDSAVYYCQHYESSPSWTFGQGTKVEIK

SEQ ID NO: 206 - protein, 109 aa, Artificial Sequence
  source: /note="Description of Artificial Sequence: Synthetic polypeptide"
EIVLTQSPATLSLSPGERATLSCRASQSVSSSYLAWYQQKPGQAPRLLIYGASSRATGIPDRFSGNGSGTDFTLTISRLEPEDFAVYYCQQYGSPPRFTFGPGTKVDIK

SEQ ID NO: 207 - protein, 109 aa, Artificial Sequence
  source: /note="Description of Artificial Sequence: Synthetic polypeptide"
EIVLTQSPGTLSLSPGERATLSCRASQSVSSSYLAWYQQRPGQAPRLLIYGASSRATGIPDRFSGSGSGTDFTLTISRLEPEDFAVYYCQHYGSSPSWTFGQGTRLEIK

SEQ ID NO: 208 - protein, 109 aa, Artificial Sequence
  source: /note="Description of Artificial Sequence: Synthetic polypeptide"
EIVMTQSPGTLSLSPGESATLSCRASQRVASNYLAWYQHKPGQAPSLLISGASSRATGVPDRFSGSGSGTDFTLAISRLEPEDSAVYYCQHYDSSPSWTFGQGTKVEIK

SEQ ID NO: 209 - protein, 109 aa, Artificial Sequence
  source: /note="Description of Artificial Sequence: Synthetic polypeptide"
EIVLTQSPGTLSLSPGERATLSCRASQSLSSNFLAWYQQKPGQAPGLLIYGASNWATGTPDRFSGSGSGTDFTLTITRLEPEDFAVYYCQYYGTSPMYTFGQGTKVEIK

SEQ ID NO: 210 - protein, 112 aa, Artificial Sequence
  source: /note="Description of Artificial Sequence: Synthetic polypeptide"
DIVLTQSPLSLPVTPGEPASISCRSSQSLLHSNGYNYLDWYLQKPGQSPQLLIYLGSNRASGVPDRFSGSGSGTDFTLKISRVEAEDVGVYYCMQALQTPLTFGGGTKVDIK

SEQ ID NO: 211 - protein, 110 aa, Artificial Sequence
  source: /note="Description of Artificial Sequence: Synthetic polypeptide"
EIVLTQSPGTLSLSPGERATLSCRASQSVSSSYLAWYQQKPGQAPRLLIYGTSSRATGISDRFSGSGSGTDFTLTISRLEPEDFAVYYCQHYGNSPPKFTFGPGTKLEIK

SEQ ID NO: 212 - protein, 109 aa, Artificial Sequence
  source: /note="Description of Artificial Sequence: Synthetic polypeptide"
EIVLTQSPGTLSLSPGERATLSCRASQSVASSFLAWYQQKPGQAPRLLIYGASGRATGIPDRFSGSGSGTDFTLTISRLEPEDFAVYYCQHYGGSPRLTFGGGTKVDIK

SEQ ID NO: 213 - protein, 487 aa, Artificial Sequence
  source: /note="Description of Artificial Sequence: Synthetic polypeptide"
MALPVTALLLPLALLLHAARPQVQLQESGPGLVKPSETLSLTCTVSGGSISSSYYYWGWIRQPPGKGLEWIGSIYYSGSAYYNPSLKSRVTISVDTSKNQFSLRLSSVTAADTAVYYCARHWQEWPDAFDIWGQGTMVTVSSGGGGSGGGGSGGGGSETTLTQSPAFMSATPGDKVIISCKASQDIDDAMNWYQQKPGEAPLFIIQSATSPVPGIPPRFSGSGFGTDFSLTINNIESEDAAYYFCLQHDNFPLTFGQGTKLEIKTTTPAPRPPTPAPTIASQPLSLRPEACRPAAGGAVHTRGLDFACDIYIWAPLAGTCGVLLLSLVITLYCKRGRKKLLYIFKQPFMRPVQTTQEEDGCSCRFPEEEEGGCELRVKFSRSADAPAYKQGQNQLYNELNLGRREEYDVLDKRRGRDPEMGGKPRRKNPQEGLYNELQKDKMAEAYSEIGMKGERRRGKGHDGLYQGLSTATKDTYDALHMQALPPR

SEQ ID NO: 214 - protein, 489 aa, Artificial Sequence
  source: /note="Description of Artificial Sequence: Synthetic polypeptide"
MALPVTALLLPLALLLHAARPQVNLRESGPALVKPTQTLTLTCTFSGFSLRTSGMCVSWIRQPPGKALEWLARIDWDEDKFYSTSLKTRLTISKDTSDNQVVLRMTNMDPADTATYYCARSGAGGTSATAFDIWGPGTMVTVSSGGGGSGGGGSGGGGSDIQMTQSPSSLSASVGDRVTITCRASQDIYNNLAWFQLKPGSAPRSLMYAANKSQSGVPSRFSGSASGTDFTLTISSLQPEDFATYYCQHYYRFPYSFGQGTKLEIKTTTPAPRPPTPAPTIASQPLSLRPEACRPAAGGAVHTRGLDFACDIYIWAPLAGTCGVLLLSLVITLYCKRGRKKLLYIFKQPFMRPVQTTQEEDGCSCRFPEEEEGGCELRVKFSRSADAPAYKQGQNQLYNELNLGRREEYDVLDKRRGRDPEMGGKPRRKNPQEGLYNELQKDKMAEAYSEIGMKGERRRGKGHDGLYQGLSTATKDTYDALHMQALPPR

SEQ ID NO: 215 - protein, 490 aa, Artificial Sequence
  source: /note="Description of Artificial Sequence: Synthetic polypeptide"
MALPVTALLLPLALLLHAARPEVQLVESGGGLVKPGGSLRLSCAASGFTFSSYSMNWVRQAPGKGLEWVSSISSSSSYIYYADSVKGRFTISRDNAKNSLYLQMNSLRAEDTAVYYCAKTIAAVYAFDIWGQGTTVTVSSGGGGSGGGGSGGGGSEIVLTQSPLSLPVTPEEPASISCRSSQSLLHSNGYNYLDWYLQKPGQSPQLLIYLGSNRASGVPDRFSGSGSGTDFTLKISRVEAEDVGVYYCMQALQTPYTFGQGTKLEIKTTTPAPRPPTPAPTIASQPLSLRPEACRPAAGGAVHTRGLDFACDIYIWAPLAGTCGVLLLSLVITLYCKRGRKKLLYIFKQPFMRPVQTTQEEDGCSCRFPEEEEGGCELRVKFSRSADAPAYKQGQNQLYNELNLGRREEYDVLDKRRGRDPEMGGKPRRKNPQEGLYNELQKDKMAEAYSEIGMKGERRRGKGHDGLYQGLSTATKDTYDALHMQALPPR

SEQ ID NO: 216 - protein, 484 aa, Artificial Sequence
  source: /note="Description of Artificial Sequence: Synthetic polypeptide"
MALPVTALLLPLALLLHAARPEVQLVESGGGLVKPGGSLRLSCAASGFTFSDYYMSWIRQAPGKGLEWVSYISSSGSTIYYADSVKGRFTISRDNAKNSLYLQMNSLRAEDTAVYYCARDLRGAFDIWGQGTMVTVSSGGGGSGGGGSGGGGSSYVLTQSPSVSAAPGYTATISCGGNNIGTKSVHWYQQKPGQAPLLVIRDDSVRPSKIPGRFSGSNSGNMATLTISGVQAGDEADFYCQVWDSDSEHVVFGGGTKLTVLTTTPAPRPPTPAPTIASQPLSLRPEACRPAAGGAVHTRGLDFACDIYIWAPLAGTCGVLLLSLVITLYCKRGRKKLLYIFKQPFMRPVQTTQEEDGCSCRFPEEEEGGCELRVKFSRSADAPAYKQGQNQLYNELNLGRREEYDVLDKRRGRDPEMGGKPRRKNPQEGLYNELQKDKMAEAYSEIGMKGERRRGKGHDGLYQGLSTATKDTYDALHMQALPPR

SEQ ID NO: 217 - protein, 485 aa, Artificial Sequence
  source: /note="Description of Artificial Sequence: Synthetic polypeptide"
MALPVTALLLPLALLLHAARPQVQLVQSGAEVKKPGASVKVSCKPSGYTVTSHYIHWVRRAPGQGLEWMGMINPSGGVTAYSQTLQGRVTMTSDTSSSTVYMELSSLRSEDTAMYYCAREGSGSGWYFDFWGRGTLVTVSSGGGGSGGGGSGGGGSSYVLTQPPSVSVSPGQTASITCSGDGLSKKYVSWYQQKAGQSPVVLISRDKERPSGIPDRFSGSNSADTATLTISGTQAMDEADYYCQAWDDTTVVFGGGTKLTVLTTTPAPRPPTPAPTIASQPLSLRPEACRPAAGGAVHTRGLDFACDIYIWAPLAGTCGVLLLSLVITLYCKRGRKKLLYIFKQPFMRPVQTTQEEDGCSCRFPEEEEGGCELRVKFSRSADAPAYKQGQNQLYNELNLGRREEYDVLDKRRGRDPEMGGKPRRKNPQEGLYNELQKDKMAEAYSEIGMKGERRRGKGHDGLYQGLSTATKDTYDALHMQALPPR

SEQ ID NO: 218 - protein, 489 aa, Artificial Sequence
  source: /note="Description of Artificial Sequence: Synthetic polypeptide"
MALPVTALLLPLALLLHAARPQVQLQESGPGLVKPSQTLSLTCTVSGGSISSGGYYWSWIRQHPGKGLEWIGYIYYSGSTYYNPSLKSRVTISVDTSKNQFSLKLSSVTAADTAVYYCARAGIAARLRGAFDIWGQGTMVTVSSGGGGSGGGGSGGGGSDIVMTQSPSSVSASVGDRVIITCRASQGIRNWLAWYQQKPGKAPNLLIYAASNLQSGVPSRFSGSGSGADFTLTISSLQPEDVATYYCQKYNSAPFTFGPGTKVDIKTTTPAPRPPTPAPTIASQPLSLRPEACRPAAGGAVHTRGLDFACDIYIWAPLAGTCGVLLLSLVITLYCKRGRKKLLYIFKQPFMRPVQTTQEEDGCSCRFPEEEEGGCELRVKFSRSADAPAYKQGQNQLYNELNLGRREEYDVLDKRRGRDPEMGGKPRRKNPQEGLYNELQKDKMAEAYSEIGMKGERRRGKGHDGLYQGLSTATKDTYDALHMQALPPR

SEQ ID NO: 219 - protein, 497 aa, Artificial Sequence
  source: /note="Description of Artificial Sequence: Synthetic polypeptide"
MALPVTALLLPLALLLHAARPQVQLVQSGAEVKKPGSSVKVSCKASGGTFSSYAISWVRQAPGQGLEWMGGIIPIFGTANYAQKFQGRVTITADESTSTAYMELSSLRSEDTAVYYCARRGGYQLLRWDVGLLRSAFDIWGQGTMVTVSSGGGGSGGGGSGGGGSSYVLTQPPSVSVAPGQTARITCGGNNIGSKSVHWYQQKPGQAPVLVLYGKNNRPSGVPDRFSGSRSGTTASLTITGAQAEDEADYYCSSRDSSGDHLRVFGTGTKVTVLTTTPAPRPPTPAPTIASQPLSLRPEACRPAAGGAVHTRGLDFACDIYIWAPLAGTCGVLLLSLVITLYCKRGRKKLLYIFKQPFMRPVQTTQEEDGCSCRFPEEEEGGCELRVKFSRSADAPAYKQGQNQLYNELNLGRREEYDVLDKRRGRDPEMGGKPRRKNPQEGLYNELQKDKMAEAYSEIGMKGERRRGKGHDGLYQGLSTATKDTYDALHMQALPPR

SEQ ID NO: 220 - protein, 492 aa, Artificial Sequence
  source: /note="Description of Artificial Sequence: Synthetic polypeptide"
MALPVTALLLPLALLLHAARPEVQLQQSGPGLVKPSQTLSLTCAISGDSVSSNSAAWNWIRQSPSRGLEWLGRTYYRSKWYSFYAISLKSRIIINPDTSKNQFSLQLKSVTPEDTAVYYCARSSPEGLFLYWFDPWGQGTLVTVSSGGDGSGGGGSGGGGSSSELTQDPAVSVALGQTIRITCQGDSLGNYYATWYQQKPGQAPVLVIYGTNNRPSGIPDRFSASSSGNTASLTITGAQAEDEADYYCNSRDSSGHHLLFGTGTKVTVLTTTPAPRPPTPAPTIASQPLSLRPEACRPAAGGAVHTRGLDFACDIYIWAPLAGTCGVLLLSLVITLYCKRGRKKLLYIFKQPFMRPVQTTQEEDGCSCRFPEEEEGGCELRVKFSRSADAPAYKQGQNQLYNELNLGRREEYDVLDKRRGRDPEMGGKPRRKNPQEGLYNELQKDKMAEAYSEIGMKGERRRGKGHDGLYQGLSTATKDTYDALHMQALPPR

SEQ ID NO: 221 - protein, 490 aa, Artificial Sequence
  source: /note="Description of Artificial Sequence: Synthetic polypeptide"
MALPVTALLLPLALLLHAARPEVQLVESGGGLVQPGGSLRLSCAASGFTFSSYAMSWVRQAPGKGLEWVSAISGSGGSTYYADSVKGRFTISRDNSKNTLYLQMNSLRAEDTAVYYCAKVEGSGSLDYWGQGTLVTVSSGGGGSGGGGSGGGGSEIVMTQSPGTLSLSPGERATLSCRASQSVSSAYLAWYQQKPGQPPRLLISGASTRATGIPDRFGGSGSGTDFTLTISRLEPEDFAVYYCQHYGSSFNGSSLFTFGQGTRLEIKTTTPAPRPPTPAPTIASQPLSLRPEACRPAAGGAVHTRGLDFACDIYIWAPLAGTCGVLLLSLVITLYCKRGRKKLLYIFKQPFMRPVQTTQEEDGCSCRFPEEEEGGCELRVKFSRSADAPAYKQGQNQLYNELNLGRREEYDVLDKRRGRDPEMGGKPRRKNPQEGLYNELQKDKMAEAYSEIGMKGERRRGKGHDGLYQGLSTATKDTYDALHMQALPPR

SEQ ID NO: 222 - protein, 485 aa, Artificial Sequence
  source: /note="Description of Artificial Sequence: Synthetic polypeptide"
MALPVTALLLPLALLLHAARPEVQLVETGGGLVQPGGSLRLSCAASGITFSRYPMSWVRQAPGKGLEWVSGISDSGVSTYYADSAKGRFTISRDNSKNTLFLQMSSLRDEDTAVYYCVTRAGSEASDIWGQGTMVTVSSGGGGSGGGGSGGGGSEIVLTQSPATLSLSPGERATLSCRASQSVSNSLAWYQQKPGQAPRLLIYDASSRATGIPDRFSGSGSGTDFTLTISRLEPEDFAIYYCQQFGTSSGLTFGGGTKLEIKTTTPAPRPPTPAPTIASQPLSLRPEACRPAAGGAVHTRGLDFACDIYIWAPLAGTCGVLLLSLVITLYCKRGRKKLLYIFKQPFMRPVQTTQEEDGCSCRFPEEEEGGCELRVKFSRSADAPAYKQGQNQLYNELNLGRREEYDVLDKRRGRDPEMGGKPRRKNPQEGLYNELQKDKMAEAYSEIGMKGERRRGKGHDGLYQGLSTATKDTYDALHMQALPPR

SEQ ID NO: 223 - protein, 492 aa, Artificial Sequence
  source: /note="Description of Artificial Sequence: Synthetic polypeptide"
MALPVTALLLPLALLLHAARPQVQLVESGGGLVQPGGSLRLSCAASGFTFSSYAMSWVRQAPGKGLEWVSAISGSGGSTYYADSVKGRFTISRDNAKNSLYLQMNSLRAEDTAIYYCARATYKRELRYYYGMDVWGQGTMVTVSSGGGGSGGGGSGGGGSEIVMTQSPGTVSLSPGERATLSCRASQSVSSSFLAWYQQKPGQAPRLLIYGASSRATGIPDRFSGSGSGTDFTLTISRLEPEDSAVYYCQQYHSSPSWTFGQGTRLEIKTTTPAPRPPTPAPTIASQPLSLRPEACRPAAGGAVHTRGLDFACDIYIWAPLAGTCGVLLLSLVITLYCKRGRKKLLYIFKQPFMRPVQTTQEEDGCSCRFPEEEEGGCELRVKFSRSADAPAYKQGQNQLYNELNLGRREEYDVLDKRRGRDPEMGGKPRRKNPQEGLYNELQKDKMAEAYSEIGMKGERRRGKGHDGLYQGLSTATKDTYDALHMQALPPR

SEQ ID NO: 224 - protein, 492 aa, Artificial Sequence
  source: /note="Description of Artificial Sequence: Synthetic polypeptide"
MALPVTALLLPLALLLHAARPEVQLVETGGGLVQPGGSLRLSCAASGFTFSSYAMSWVRQAPGKGLEWVSAISGSGGSTYYADSVKGRFTISRDNSKNTLYLQMNTLKAEDTAVYYCARATYKRELRYYYGMDVWGQGTTVTVSSGGGGSGGGGSGGGGSEIVLTQSPSTLSLSPGESATLSCRASQSVSTTFLAWYQQKPGQAPRLLIYGSSNRATGIPDRFSGSGSGTDFTLTIRRLEPEDFAVYYCQQYHSSPSWTFGQGTKVEIKTTTPAPRPPTPAPTIASQPLSLRPEACRPAAGGAVHTRGLDFACDIYIWAPLAGTCGVLLLSLVITLYCKRGRKKLLYIFKQPFMRPVQTTQEEDGCSCRFPEEEEGGCELRVKFSRSADAPAYKQGQNQLYNELNLGRREEYDVLDKRRGRDPEMGGKPRRKNPQEGLYNELQKDKMAEAYSEIGMKGERRRGKGHDGLYQGLSTATKDTYDALHMQALPPR

SEQ ID NO: 225 - protein, 483 aa, Artificial Sequence
  source: /note="Description of Artificial Sequence: Synthetic polypeptide"
MALPVTALLLPLALLLHAARPEVQLVETGGGLVQPGRSLRLSCAASGFTFDDYAMHWVRQAPGKGLEWVSGISWNSGSIGYADSVKGRFTISRDNAKNSLYLQMNSLRDEDTAVYYCARVGKAVPDVWGQGTTVTVSSGGGGSGGGGSGGGGSDIVMTQTPSSLSASVGDRVTITCRASQSISSYLNWYQQKPGKAPKLLIYAASSLQSGVPSRFSGSGSGTDFTLTISSLQPEDFATYYCQQSYSTPYSFGQGTRLEIKTTTPAPRPPTPAPTIASQPLSLRPEACRPAAGGAVHTRGLDFACDIYIWAPLAGTCGVLLLSLVITLYCKRGRKKLLYIFKQPFMRPVQTTQEEDGCSCRFPEEEEGGCELRVKFSRSADAPAYKQGQNQLYNELNLGRREEYDVLDKRRGRDPEMGGKPRRKNPQEGLYNELQKDKMAEAYSEIGMKGERRRGKGHDGLYQGLSTATKDTYDALHMQALPPR

SEQ ID NO: 226 - protein, 490 aa, Artificial Sequence
  source: /note="Description of Artificial Sequence: Synthetic polypeptide"
MALPVTALLLPLALLLHAARPEVQLVESGGGLVQPGRSLRLSCTASGFTFDDYAMHWVRQRPGKGLEWVASINWKGNSLAYGDSVKGRFAISRDNAKNTVFLQMNSLRTEDTAVYYCASHQGVAYYNYAMDVWGRGTLVTVSSGGGGSGGGGSGGGGSEIVLTQSPGTLSLSPGERATLSCRATQSIGSSFLAWYQQRPGQAPRLLIYGASQRATGIPDRFSGRGSGTDFTLTISRVEPEDSAVYYCQHYESSPSWTFGQGTKVEIKTTTPAPRPPTPAPTIASQPLSLRPEACRPAAGGAVHTRGLDFACDIYIWAPLAGTCGVLLLSLVITLYCKRGRKKLLYIFKQPFMRPVQTTQEEDGCSCRFPEEEEGGCELRVKFSRSADAPAYKQGQNQLYNELNLGRREEYDVLDKRRGRDPEMGGKPRRKNPQEGLYNELQKDKMAEAYSEIGMKGERRRGKGHDGLYQGLSTATKDTYDALHMQALPPR

SEQ ID NO: 227 - protein, 485 aa, Artificial Sequence
  source: /note="Description of Artificial Sequence: Synthetic polypeptide"
MALPVTALLLPLALLLHAARPEVQLVESGGGLVQPGGSLRLSCAASGFTFSSYAMSWVRQAPGKGLEWVSAISGSGGSTYYADSVKGRFTISRDNSKNTLYLQMNSLRAEDTAVYYCAKVVRDGMDVWGQGTTVTVSSGGGGSGGGGSGGGGSEIVLTQSPATLSLSPGERATLSCRASQSVSSSYLAWYQQKPGQAPRLLIYGASSRATGIPDRFSGNGSGTDFTLTISRLEPEDFAVYYCQQYGSPPRFTFGPGTKVDIKTTTPAPRPPTPAPTIASQPLSLRPEACRPAAGGAVHTRGLDFACDIYIWAPLAGTCGVLLLSLVITLYCKRGRKKLLYIFKQPFMRPVQTTQEEDGCSCRFPEEEEGGCELRVKFSRSADAPAYKQGQNQLYNELNLGRREEYDVLDKRRGRDPEMGGKPRRKNPQEGLYNELQKDKMAEAYSEIGMKGERRRGKGHDGLYQGLSTATKDTYDALHMQALPPR

SEQ ID NO: 228 - protein, 486 aa, Artificial Sequence
  source: /note="Description of Artificial Sequence: Synthetic polypeptide"
MALPVTALLLPLALLLHAARPEVQLLESGGGLVQPGGSLRLSCAASGFTFSSYAMSWVRQAPGKGLEWVSAISGSGGSTYYADSVKGRFTISRDNSKNTLYLQMNSLRAEDTAVYYCAKIPQTGTFDYWGQGTLVTVSSGGGGSGGGGSGGGGSEIVLTQSPGTLSLSPGERATLSCRASQSVSSSYLAWYQQRPGQAPRLLIYGASSRATGIPDRFSGSGSGTDFTLTISRLEPEDFAVYYCQHYGSSPSWTFGQGTRLEIKTTTPAPRPPTPAPTIASQPLSLRPEACRPAAGGAVHTRGLDFACDIYIWAPLAGTCGVLLLSLVITLYCKRGRKKLLYIFKQPFMRPVQTTQEEDGCSCRFPEEEEGGCELRVKFSRSADAPAYKQGQNQLYNELNLGRREEYDVLDKRRGRDPEMGGKPRRKNPQEGLYNELQKDKMAEAYSEIGMKGERRRGKGHDGLYQGLSTATKDTYDALHMQALPPR

SEQ ID NO: 229 - protein, 492 aa, Artificial Sequence
  source: /note="Description of Artificial Sequence: Synthetic polypeptide"
MALPVTALLLPLALLLHAARPEVQLVETGGGLVQPGGSLRLSCAASGFTFSSYAMSWVRQAPGKGLEWVSAISGSGGSTYYADSVKGRFTMSRENDKNSVFLQMNSLRVEDTGVYYCARANYKRELRYYYGMDVWGQGTMVTVSSGGGGSGGGGSGGGGSEIVMTQSPGTLSLSPGESATLSCRASQRVASNYLAWYQHKPGQAPSLLISGASSRATGVPDRFSGSGSGTDFTLAISRLEPEDSAVYYCQHYDSSPSWTFGQGTKVEIKTTTPAPRPPTPAPTIASQPLSLRPEACRPAAGGAVHTRGLDFACDIYIWAPLAGTCGVLLLSLVITLYCKRGRKKLLYIFKQPFMRPVQTTQEEDGCSCRFPEEEEGGCELRVKFSRSADAPAYKQGQNQLYNELNLGRREEYDVLDKRRGRDPEMGGKPRRKNPQEGLYNELQKDKMAEAYSEIGMKGERRRGKGHDGLYQGLSTATKDTYDALHMQALPPR

SEQ ID NO: 230 - protein, 488 aa, Artificial Sequence
  source: /note="Description of Artificial Sequence: Synthetic polypeptide"
MALPVTALLLPLALLLHAARPEVQLLETGGGLVQPGGSLRLSCAASGFSFSSYAMSWVRQAPGKGLEWVSAISGSGGSTYYADSVKGRFTISRDNSKNTLYLQMNSLRAEDTAVYYCAKALVGATGAFDIWGQGTLVTVSSGGGGSGGGGSGGGGSEIVLTQSPGTLSLSPGERATLSCRASQSLSSNFLAWYQQKPGQAPGLLIYGASNWATGTPDRFSGSGSGTDFTLTITRLEPEDFAVYYCQYYGTSPMYTFGQGTKVEIKTTTPAPRPPTPAPTIASQPLSLRPEACRPAAGGAVHTRGLDFACDIYIWAPLAGTCGVLLLSLVITLYCKRGRKKLLYIFKQPFMRPVQTTQEEDGCSCRFPEEEEGGCELRVKFSRSADAPAYKQGQNQLYNELNLGRREEYDVLDKRRGRDPEMGGKPRRKNPQEGLYNELQKDKMAEAYSEIGMKGERRRGKGHDGLYQGLSTATKDTYDALHMQALPPR

SEQ ID NO: 231 - protein, 488 aa, Artificial Sequence
  source: /note="Description of Artificial Sequence: Synthetic polypeptide"
MALPVTALLLPLALLLHAARPEVQLLESGGGLVQPGGSLRLSCAASGFTFSSYAMSWVRQAPGKGLEWVSAISGSGGSTYYADSVKGRFTISRDNSKNTLYLQMNSLRAEDTAVYYCVLWFGEGFDPWGQGTLVTVSSGGGGSGGGGSGGGGSDIVLTQSPLSLPVTPGEPASISCRSSQSLLHSNGYNYLDWYLQKPGQSPQLLIYLGSNRASGVPDRFSGSGSGTDFTLKISRVEAEDVGVYYCMQALQTPLTFGGGTKVDIKTTTPAPRPPTPAPTIASQPLSLRPEACRPAAGGAVHTRGLDFACDIYIWAPLAGTCGVLLLSLVITLYCKRGRKKLLYIFKQPFMRPVQTTQEEDGCSCRFPEEEEGGCELRVKFSRSADAPAYKQGQNQLYNELNLGRREEYDVLDKRRGRDPEMGGKPRRKNPQEGLYNELQKDKMAEAYSEIGMKGERRRGKGHDGLYQGLSTATKDTYDALHMQALPPR

SEQ ID NO: 232 - protein, 495 aa, Artificial Sequence
  source: /note="Description of Artificial Sequence: Synthetic polypeptide"
MALPVTALLLPLALLLHAARPQVQLVESGGGLVQPGGSLRLSCAASGFTFSSYAMSWVRQAPGKGLEWVSAISGSGGSTYYADSVKGRFTISRDNSKNTLYLQMNSLRAEDTAVYYCAKVGYDSSGYYRDYYGMDVWGQGTTVTVSSGGGGSGGGGSGGGGSEIVLTQSPGTLSLSPGERATLSCRASQSVSSSYLAWYQQKPGQAPRLLIYGTSSRATGISDRFSGSGSGTDFTLTISRLEPEDFAVYYCQHYGNSPPKFTFGPGTKLEIKTTTPAPRPPTPAPTIASQPLSLRPEACRPAAGGAVHTRGLDFACDIYIWAPLAGTCGVLLLSLVITLYCKRGRKKLLYIFKQPFMRPVQTTQEEDGCSCRFPEEEEGGCELRVKFSRSADAPAYKQGQNQLYNELNLGRREEYDVLDKRRGRDPEMGGKPRRKNPQEGLYNELQKDKMAEAYSEIGMKGERRRGKGHDGLYQGLSTATKDTYDALHMQALPPR

SEQ ID NO: 233 - protein, 490 aa, Artificial Sequence
  source: /note="Description of Artificial Sequence: Synthetic polypeptide"
MALPVTALLLPLALLLHAARPEVQLVESGGGLVQPGGSLRLSCAASGFTFSSYAMSWVRQAPGKGLEWVSAISGSGGSTYYADSVKGRFTISRDNSKNTLYLQMNSLRAEDTAVYYCAKMGWSSGYLGAFDIWGQGTTVTVSSGGGGSGGGGSGGGGSEIVLTQSPGTLSLSPGERATLSCRASQSVASSFLAWYQQKPGQAPRLLIYGASGRATGIPDRFSGSGSGTDFTLTISRLEPEDFAVYYCQHYGGSPRLTFGGGTKVDIKTTTPAPRPPTPAPTIASQPLSLRPEACRPAAGGAVHTRGLDFACDIYIWAPLAGTCGVLLLSLVITLYCKRGRKKLLYIFKQPFMRPVQTTQEEDGCSCRFPEEEEGGCELRVKFSRSADAPAYKQGQNQLYNELNLGRREEYDVLDKRRGRDPEMGGKPRRKNPQEGLYNELQKDKMAEAYSEIGMKGERRRGKGHDGLYQGLSTATKDTYDALHMQALPPR

SEQ ID NO: 234 - DNA, 1461 bp, Artificial Sequence
  source: /note="Description of Artificial Sequence: Synthetic polynucleotide"
atggccctccctgtcaccgccctgctgcttccgctggctcttctgctccacgccgctcggccccaagtgcagcttcaggaaagcggaccgggcctggtcaagccatccgaaactctctccctgacttgcactgtgtctggcggttccatctcatcgtcgtactactactggggctggattaggcagccgcccggaaagggactggagtggatcggaagcatctactattccggctcggcgtactacaaccctagcctcaagtcgagagtgaccatctccgtggatacctccaagaaccagttttccctgcgcctgagctccgtgaccgccgctgacaccgccgtgtactactgtgctcggcattggcaggaatggcccgatgccttcgacatttggggccagggcactatggtcactgtgtcatccgggggtggaggcagcgggggaggagggtccggggggggaggttcagagacaaccttgacccagtcacccgcattcatgtccgccactccgggagacaaggtcatcatctcgtgcaaagcgtcccaggatatcgacgatgccatgaattggtaccagcagaagcctggcgaagcgccgctgttcattatccaatccgcaacctcgcccgtgcctggaatcccaccgcggttcagcggcagcggtttcggaaccgacttttccctgaccattaacaacattgagtccgaggacgccgcctactacttctgcctgcaacacgacaacttccctctcacgttcggccagggaaccaagctggaaatcaagaccactaccccagcaccgaggccacccaccccggctcctaccatcgcctcccagcctctgtccctgcgtccggaggcatgtagacccgcagctggtggggccgtgcatacccggggtcttgacttcgcctgcgatatctacatttgggcccctctggctggtacttgcggggtcctgctgctttcactcgtgatcactctttactgtaagcgcggtcggaagaagctgctgtacatctttaagcaacccttcatgaggcctgtgcagactactcaagaggaggacggctgttcatgccggttcccagaggaggaggaaggcggctgcgaactgcgcgtgaaattcagccgcagcgcagatgctccagcctacaagcaggggcagaaccagctctacaacgaactcaatcttggtcggagagaggagtacgacgtgctggacaagcggagaggacgggacccagaaatgggcgggaagccgcgcagaaagaatccccaagagggcctgtacaacgagctccaaaaggataagatggcagaagcctatagcgagattggtatgaaaggggaacgcagaagaggcaaaggccacgacggactgtaccagggactcagcaccgccaccaaggacacctatgacgctcttcacatgcaggccctgccgcctcgg

SEQ ID NO: 235 - DNA, 1467 bp, Artificial Sequence
  source: /note="Description of Artificial Sequence: Synthetic polynucleotide"
atggccctccctgtcaccgccctgctgcttccgctggctcttctgctccacgccgctcggccccaagtcaatctgcgcgaatccggccccgccttggtcaagcctacccagaccctcactctgacctgtactttctccggcttctccctgcggacttccgggatgtgcgtgtcctggatcagacagcctccgggaaaggccctggagtggctcgctcgcattgactgggatgaggacaagttctactccacctcactcaagaccaggctgaccatcagcaaagatacctctgacaaccaagtggtgctccgcatgaccaacatggacccagccgacactgccacttactactgcgcgaggagcggagcgggcggaacctccgccaccgccttcgatatttggggcccgggtaccatggtcaccgtgtcaagcggaggaggggggtccgggggcggcggttccgggggaggcggatcggacattcagatgactcagtcaccatcgtccctgagcgctagcgtgggcgacagagtgacaatcacttgccgggcatcccaggacatctataacaaccttgcgtggttccagctgaagcctggttccgcaccgcggtcacttatgtacgccgccaacaagagccagtcgggagtgccgtcccggttttccggttcggcctcgggaactgacttcaccctgacgatctccagcctgcaacccgaggatttcgccacctactactgccagcactactaccgctttccctactcgttcggacagggaaccaagctggaaatcaagaccactaccccagcaccgaggccacccaccccggctcctaccatcgcctcccagcctctgtccctgcgtccggaggcatgtagacccgcagctggtggggccgtgcatacccggggtcttgacttcgcctgcgatatctacatttgggcccctctggctggtacttgcggggtcctgctgctttcactcgtgatcactctttactgtaagcgcggtcggaagaagctgctgtacatctttaagcaacccttcatgaggcctgtgcagactactcaagaggaggacggctgttcatgccggttcccagaggaggaggaaggcggctgcgaactgcgcgtgaaattcagccgcagcgcagatgctccagcctacaagcaggggcagaaccagctctacaacgaactcaatcttggtcggagagaggagtacgacgtgctggacaagcggagaggacgggacccagaaatgggcgggaagccgcgcagaaagaatccccaagagggcctgtacaacgagctccaaaaggataagatggcagaagcctatagcgagattggtatgaaaggggaacgcagaagaggcaaaggccacgacggactgtaccagggactcagcaccgccaccaaggacacctatgacgctcttcacatgcaggccctgccgcctcgg

SEQ ID NO: 236 - DNA, 1470 bp, Artificial Sequence
  source: /note="Description of Artificial Sequence: Synthetic polynucleotide"
atggccctccctgtcaccgccctgctgcttccgctggctcttctgctccacgccgctcggcccgaagtgcagcttgtcgaatccggggggggactggtcaagccgggcggatcactgagactgtcctgcgccgcgagcggcttcacgttctcctcctactccatgaactgggtccgccaagcccccgggaagggactggaatgggtgtcctctatctcctcgtcgtcgtcctacatctactacgccgactccgtgaagggaagattcaccatttcccgcgacaacgcaaagaactcactgtacttgcaaatgaactcactccgggccgaagatactgctgtgtactattgcgccaagactattgccgccgtctacgctttcgacatctggggccagggaaccaccgtgactgtgtcgtccggtggtggtggctcgggcggaggaggaagcggcggcggggggtccgagattgtgctgacccagtcgccactgagcctccctgtgacccccgaggaacccgccagcatcagctgccggtccagccagtccctgctccactccaacggatacaattacctcgattggtaccttcagaagcctggacaaagcccgcagctgctcatctacttgggatcaaaccgcgcgtcaggagtgcctgaccggttctccggctcgggcagcggtaccgatttcaccctgaaaatctccagggtggaggcagaggacgtgggagtgtattactgtatgcaggcgctgcagactccgtacacatttgggcagggcaccaagctggagatcaagaccactaccccagcaccgaggccacccaccccggctcctaccatcgcctcccagcctctgtccctgcgtccggaggcatgtagacccgcagctggtggggccgtgcatacccggggtcttgacttcgcctgcgatatctacatttgggcccctctggctggtacttgcggggtcctgctgctttcactcgtgatcactctttactgtaagcgcggtcggaagaagctgctgtacatctttaagcaacccttcatgaggcctgtgcagactactcaagaggaggacggctgttcatgccggttcccagaggaggaggaaggcggctgcgaactgcgcgtgaaattcagccgcagcgcagatgctccagcctacaagcaggggcagaaccagctctacaacgaactcaatcttggtcggagagaggagtacgacgtgctggacaagcggagaggacgggacccagaaatgggcgggaagccgcgcagaaagaatccccaagagggcctgtacaacgagctccaaaaggataagatggcagaagcctatagcgagattggtatgaaaggggaacgcagaagaggcaaaggccacgacggactgtaccagggactcagcaccgccaccaaggacacctatgacgctcttcacatgcaggccctgccgcctcgg

SEQ ID NO: 237 - DNA, 1452 bp, Artificial Sequence
  source: /note="Description of Artificial Sequence: Synthetic polynucleotide"
atggccctccctgtcaccgccctgctgcttccgctggctcttctgctccacgccgctcggcccgaagtccagctcgtggagtccggcggaggccttgtgaagcctggaggttcgctgagactgtcctgcgccgcctccggcttcaccttctccgactactacatgtcctggatcagacaggccccgggaaagggcctggaatgggtgtcctacatctcgtcatcgggcagcactatctactacgcggactcagtgaaggggcggttcaccatttcccgggataacgcgaagaactcgctgtatctgcaaatgaactcactgagggccgaggacaccgccgtgtactactgcgcccgcgatctccgcggggcatttgacatctggggacagggaaccatggtcacagtgtccagcggagggggaggatcgggtggcggaggttccgggggtggaggctcctcctacgtgctgactcagagcccaagcgtcagcgctgcgcccggttacacggcaaccatctcctgtggcggaaacaacattgggaccaagtctgtgcactggtatcagcagaagccgggccaagctcccctgttggtgatccgcgatgactccgtgcggcctagcaaaattccgggacggttctccggctccaacagcggcaatatggccactctcaccatctcgggagtgcaggccggagatgaagccgacttctactgccaagtctgggactcagactccgagcatgtggtgttcgggggcggaaccaagctgactgtgctcaccactaccccagcaccgaggccacccaccccggctcctaccatcgcctcccagcctctgtccctgcgtccggaggcatgtagacccgcagctggtggggccgtgcatacccggggtcttgacttcgcctgcgatatctacatttgggcccctctggctggtacttgcggggtcctgctgctttcactcgtgatcactctttactgtaagcgcggtcggaagaagctgctgtacatctttaagcaacccttcatgaggcctgtgcagactactcaagaggaggacggctgttcatgccggttcccagaggaggaggaaggcggctgcgaactgcgcgtgaaattcagccgcagcgcagatgctccagcctacaagcaggggcagaaccagctctacaacgaactcaatcttggtcggagagaggagtacgacgtgctggacaagcggagaggacgggacccagaaatgggcgggaagccgcgcagaaagaatccccaagagggcctgtacaacgagctccaaaaggataagatggcagaagcctatagcgagattggtatgaaaggggaacgcagaagaggcaaaggccacgacggactgtaccagggactcagcaccgccaccaaggacacctatgacgctcttcacatgcaggccctgccgcctcgg

SEQ ID NO: 238 - DNA, 1455 bp, Artificial Sequence
  source: /note="Description of Artificial Sequence: Synthetic polynucleotide"
atggccctccctgtcaccgccctgctgcttccgctggctcttctgctccacgccgctcggccccaagtgcagctggtgcagagcggggccgaagtcaagaagccgggagcctccgtgaaagtgtcctgcaagccttcgggatacaccgtgacctcccactacattcattgggtccgccgcgcccccggccaaggactcgagtggatgggcatgatcaaccctagcggcggagtgaccgcgtacagccagacgctgcagggacgcgtgactatgacctcggatacctcctcctccaccgtctatatggaactgtccagcctgcggtccgaggataccgccatgtactactgcgcccgggaaggatcaggctccgggtggtatttcgacttctggggaagaggcaccctcgtgactgtgtcatctgggggagggggttccggtggtggcggatcgggaggaggcggttcatcctacgtgctgacccagccaccctccgtgtccgtgagccccggccagactgcatcgattacatgtagcggcgacggcctctccaagaaatacgtgtcgtggtaccagcagaaggccggacagagcccggtggtgctgatctcaagagataaggagcggcctagcggaatcccggacaggttctcgggttccaactccgcggacactgctactctgaccatctcggggacccaggctatggacgaagccgattactactgccaagcctgggacgacactactgtcgtgtttggagggggcaccaagttgaccgtccttaccactaccccagcaccgaggccacccaccccggctcctaccatcgcctcccagcctctgtccctgcgtccggaggcatgtagacccgcagctggtggggccgtgcatacccggggtcttgacttcgcctgcgatatctacatttgggcccctctggctggtacttgcggggtcctgctgctttcactcgtgatcactctttactgtaagcgcggtcggaagaagctgctgtacatctttaagcaacccttcatgaggcctgtgcagactactcaagaggaggacggctgttcatgccggttcccagaggaggaggaaggcggctgcgaactgcgcgtgaaattcagccgcagcgcagatgctccagcctacaagcaggggcagaaccagctctacaacgaactcaatcttggtcggagagaggagtacgacgtgctggacaagcggagaggacgggacccagaaatgggcgggaagccgcgcagaaagaatccccaagagggcctgtacaacgagctccaaaaggataagatggcagaagcctatagcgagattggtatgaaaggggaacgcagaagaggcaaaggccacgacggactgtaccagggactcagcaccgccaccaaggacacctatgacgctcttcacatgcaggccctgccgcctcgg

SEQ ID NO: 239 - DNA, 1467 bp, Artificial Sequence
  source: /note="Description of Artificial Sequence: Synthetic polynucleotide"
atggccctccctgtcaccgccctgctgcttccgctggctcttctgctccacgccgctcggccccaagtgcagcttcaggagagcggcccgggactcgtgaagccgtcccagaccctgtccctgacttgcaccgtgtcgggaggaagcatctcgagcggaggctactattggtcgtggattcggcagcaccctggaaagggcctggaatggatcggctacatctactactccggctcgacctactacaacccatcgctgaagtccagagtgacaatctcagtggacacgtccaagaatcagttcagcctgaagctctcttccgtgactgcggccgacaccgccgtgtactactgcgcacgcgctggaattgccgcccggctgaggggtgccttcgacatttggggacagggcaccatggtcaccgtgtcctccggcggcggaggttccgggggtggaggctcaggaggaggggggtccgacatcgtcatgactcagtcgccctcaagcgtcagcgcgtccgtcggggacagagtgatcatcacctgtcgggcgtcccagggaattcgcaactggctggcctggtatcagcagaagcccggaaaggcccccaacctgttgatctacgccgcctcaaacctccaatccggggtgccgagccgcttcagcggctccggttcgggtgccgatttcactctgaccatctcctccctgcaacctgaagatgtggctacctactactgccaaaagtacaactccgcaccttttactttcggaccggggaccaaagtggacattaagaccactaccccagcaccgaggccacccaccccggctcctaccatcgcctcccagcctctgtccctgcgtccggaggcatgtagacccgcagctggtggggccgtgcatacccggggtcttgacttcgcctgcgatatctacatttgggcccctctggctggtacttgcggggtcctgctgctttcactcgtgatcactctttactgtaagcgcggtcggaagaagctgctgtacatctttaagcaacccttcatgaggcctgtgcagactactcaagaggaggacggctgttcatgccggttcccagaggaggaggaaggcggctgcgaactgcgcgtgaaattcagccgcagcgcagatgctccagcctacaagcaggggcagaaccagctctacaacgaactcaatcttggtcggagagaggagtacgacgtgctggacaagcggagaggacgggacccagaaatgggcgggaagccgcgcagaaagaatccccaagagggcctgtacaacgagctccaaaaggataagatggcagaagcctatagcgagattggtatgaaaggggaacgcagaagaggcaaaggccacgacggactgtaccagggactcagcaccgccaccaaggacacctatgacgctcttcacatgcaggccctgccgcctcgg

SEQ ID NO: 240 - DNA, 1491 bp, Artificial Sequence
  source: /note="Description of Artificial Sequence: Synthetic polynucleotide"
atggccctccctgtcaccgccctgctgcttccgctggctcttctgctccacgccgctcggccccaagtgcagctggtccagtcgggcgccgaggtcaagaagcccgggagctctgtgaaagtgtcctgcaaggcctccgggggcacctttagctcctacgccatctcctgggtccgccaagcaccgggtcaaggcctggagtggatggggggaattatccctatcttcggcactgccaactacgcccagaagttccagggacgcgtgaccattaccgcggacgaatccacctccaccgcttatatggagctgtccagcttgcgctcggaagataccgccgtgtactactgcgcccggaggggtggataccagctgctgagatgggacgtgggcctcctgcggtcggcgttcgacatctggggccagggcactatggtcactgtgtccagcggaggaggcggatcgggaggcggcggatcagggggaggcggttccagctacgtgcttactcaacccccttcggtgtccgtggccccgggacagaccgccagaatcacttgcggaggaaacaacattgggtccaagagcgtgcattggtaccagcagaagccaggacaggcccctgtgctggtgctctacgggaagaacaatcggcccagcggagtgccggacaggttctcgggttcacgctccggtacaaccgcttcactgactatcaccggggcccaggcagaggatgaagcggactactactgttcctcccgggattcatccggcgaccacctccgggtgttcggaaccggaacgaaggtcaccgtgctgaccactaccccagcaccgaggccacccaccccggctcctaccatcgcctcccagcctctgtccctgcgtccggaggcatgtagacccgcagctggtggggccgtgcatacccggggtcttgacttcgcctgcgatatctacatttgggcccctctggctggtacttgcggggtcctgctgctttcactcgtgatcactctttactgtaagcgcggtcggaagaagctgctgtacatctttaagcaacccttcatgaggcctgtgcagactactcaagaggaggacggctgttcatgccggttcccagaggaggaggaaggcggctgcgaactgcgcgtgaaattcagccgcagcgcagatgctccagcctacaagcaggggcagaaccagctctacaacgaactcaatcttggtcggagagaggagtacgacgtgctggacaagcggagaggacgggacccagaaatgggcgggaagccgcgcagaaagaatccccaagagggcctgtacaacgagctccaaaaggataagatggcagaagcctatagcgagattggtatgaaaggggaacgcagaagaggcaaaggccacgacggactgtaccagggactcagcaccgccaccaaggacacctatgacgctcttcacatgcaggccctgccgcctcgg

SEQ ID NO: 241 - DNA, 1476 bp, Artificial Sequence
  source: /note="Description of Artificial Sequence: Synthetic polynucleotide"
atggccctccctgtcaccgccctgctgcttccgctggctcttctgctccacgccgctcggcccgaagtgcagctccaacagtcaggaccggggctcgtgaagccatcccagaccctgtccctgacttgtgccatctcgggagatagcgtgtcatcgaactccgccgcctggaactggattcggcagagcccgtcccgcggactggagtggcttggaaggacctactaccggtccaagtggtactctttctacgcgatctcgctgaagtcccgcattatcattaaccctgatacctccaagaatcagttctccctccaactgaaatccgtcacccccgaggacacagcagtgtattactgcgcacggagcagccccgaaggactgttcctgtattggtttgacccctggggccaggggactcttgtgaccgtgtcgagcggcggagatgggtccggtggcggtggttcggggggcggcggatcatcatccgaactgacccaggacccggctgtgtccgtggcgctgggacaaaccatccgcattacgtgccagggagactccctgggcaactactacgccacttggtaccagcagaagccgggccaagcccctgtgttggtcatctacgggaccaacaacagaccttccggcatccccgaccggttcagcgcttcgtcctccggcaacactgccagcctgaccatcactggagcgcaggccgaagatgaggccgactactactgcaacagcagagactcctcgggtcatcacctcttgttcggaactggaaccaaggtcaccgtgctgaccactaccccagcaccgaggccacccaccccggctcctaccatcgcctcccagcctctgtccctgcgtccggaggcatgtagacccgcagctggtggggccgtgcatacccggggtcttgacttcgcctgcgatatctacatttgggcccctctggctggtacttgcggggtcctgctgctttcactcgtgatcactctttactgtaagcgcggtcggaagaagctgctgtacatctttaagcaacccttcatgaggcctgtgcagactactcaagaggaggacggctgttcatgccggttcccagaggaggaggaaggcggctgcgaactgcgcgtgaaattcagccgcagcgcagatgctccagcctacaagcaggggcagaaccagctctacaacgaactcaatcttggtcggagagaggagtacgacgtgctggacaagcggagaggacgggacccagaaatgggcgggaagccgcgcagaaagaatccccaagagggcctgtacaacgagctccaaaaggataagatggcagaagcctatagcgagattggtatgaaaggggaacgcagaagaggcaaaggccacgacggactgtaccagggactcagcaccgccaccaaggacacctatgacgctcttcacatgcaggccctgccgcctcgg

SEQ ID NO: 242 - DNA, 1470 bp, Artificial Sequence
  source: /note="Description of Artificial Sequence: Synthetic polynucleotide"
atggccctccctgtcaccgccctgctgcttccgctggctcttctgctccacgccgctcggcccgaagtgcagctcgtggagtcaggaggcggcctggtccagccgggagggtcccttagactgtcatgcgccgcaagcggattcactttctcctcctatgccatgagctgggtccgccaagcccccggaaagggactggaatgggtgtccgccatctcggggtctggaggctcaacttactacgctgactccgtgaagggacggttcaccattagccgcgacaactccaagaacaccctctacctccaaatgaactccctgcgggccgaggataccgccgtctactactgcgccaaagtggaaggttcaggatcgctggactactggggacagggtactctcgtgaccgtgtcatcgggcggaggaggttccggcggtggcggctccggcggcggagggtcggagatcgtgatgacccagagccctggtactctgagcctttcgccgggagaaagggccaccctgtcctgccgcgcttcccaatccgtgtcctccgcgtacttggcgtggtaccagcagaagccgggacagccccctcggctgctgatcagcggggccagcacccgggcaaccggaatcccagacagattcgggggttccggcagcggcacagatttcaccctgactatttcgaggttggagcccgaggactttgcggtgtattactgtcagcactacgggtcgtcctttaatggctccagcctgttcacgttcggacaggggacccgcctggaaatcaagaccactaccccagcaccgaggccacccaccccggctcctaccatcgcctcccagcctctgtccctgcgtccggaggcatgtagacccgcagctggtggggccgtgcatacccggggtcttgacttcgcctgcgatatctacatttgggcccctctggctggtacttgcggggtcctgctgctttcactcgtgatcactctttactgtaagcgcggtcggaagaagctgctgtacatctttaagcaacccttcatgaggcctgtgcagactactcaagaggaggacggctgttcatgccggttcccagaggaggaggaaggcggctgcgaactgcgcgtgaaattcagccgcagcgcagatgctccagcctacaagcaggggcagaaccagctctacaacgaactcaatcttggtcggagagaggagtacgacgtgctggacaagcggagaggacgggacccagaaatgggcgggaagccgcgcagaaagaatccccaagagggcctgtacaacgagctccaaaaggataagatggcagaagcctatagcgagattggtatgaaaggggaacgcagaagaggcaaaggccacgacggactgtaccagggactcagcaccgccaccaaggacacctatgacgctcttcacatgcaggccctgccgcctcgg

SEQ ID NO: 243 - DNA, 1455 bp, Artificial Sequence
  source: /note="Description of Artificial Sequence: Synthetic polynucleotide"
atggccctccctgtcaccgccctgctgcttccgctggctcttctgctccacgccgctcggcccgaagtgcaactggtggaaaccggtggcggcctggtgcagcctggaggatcattgaggctgtcatgcgcggccagcggtattaccttctcccggtaccccatgtcctgggtcagacaggccccggggaaagggcttgaatgggtgtccgggatctcggactccggtgtcagcacttactacgccgactccgccaagggacgcttcaccatttcccgggacaactcgaagaacaccctgttcctccaaatgagctccctccgggacgaggatactgcagtgtactactgcgtgacccgcgccgggtccgaggcgtctgacatttggggacagggcactatggtcaccgtgtcgtccggcggagggggctcgggaggcggtggcagcggaggaggagggtccgagatcgtgctgacccaatccccggccaccctctcgctgagccctggagaaagggcaaccttgtcctgtcgcgcgagccagtccgtgagcaactccctggcctggtaccagcagaagcccggacaggctccgagacttctgatctacgacgcttcgagccgggccactggaatccccgaccgcttttcggggtccggctcaggaaccgatttcaccctgacaatctcacggctggagccagaggatttcgccatctattactgccagcagttcggtacttcctccggcctgactttcggaggcggcacgaagctcgaaatcaagaccactaccccagcaccgaggccacccaccccggctcctaccatcgcctcccagcctctgtccctgcgtccggaggcatgtagacccgcagctggtggggccgtgcatacccggggtcttgacttcgcctgcgatatctacatttgggcccctctggctggtacttgcggggtcctgctgctttcactcgtgatcactctttactgtaagcgcggtcggaagaagctgctgtacatctttaagcaacccttcatgaggcctgtgcagactactcaagaggaggacggctgttcatgccggttcccagaggaggaggaaggcggctgcgaactgcgcgtgaaattcagccgcagcgcagatgctccagcctacaagcaggggcagaaccagctctacaacgaactcaatcttggtcggagagaggagtacgacgtgctggacaagcggagaggacgggacccagaaatgggcgggaagccgcgcagaaagaatccccaagagggcctgtacaacgagctccaaaaggataagatggcagaagcctatagcgagattggtatgaaaggggaacgcagaagaggcaaaggccacgacggactgtaccagggactcagcaccgccaccaaggacacctatgacgctcttcacatgcaggccctgccgcctcgg

SEQ ID NO: 244 - DNA, 1476 bp, Artificial Sequence
  source: /note="Description of Artificial Sequence: Synthetic polynucleotide"
atggccctccctgtcaccgccctgctgcttccgctggctcttctgctccacgccgctcggccccaagtgcagctcgtggaatcgggtggcggactggtgcagccggggggctcacttagactgtcctgcgcggccagcggattcactttctcctcctacgccatgtcctgggtcagacaggcccctggaaagggcctggaatgggtgtccgcaatcagcggcagcggcggctcgacctattacgcggattcagtgaagggcagattcaccatttcccgggacaacgccaagaactccttgtaccttcaaatgaactccctccgcgcggaagataccgcaatctactactgcgctcgggccacttacaagagggaactgcgctactactacgggatggacgtctggggccagggaaccatggtcaccgtgtccagcggaggaggaggatcgggaggaggcggtagcgggggtggagggtcggagatcgtgatgacccagtcccccggcactgtgtcgctgtcccccggcgaacgggccaccctgtcatgtcgggccagccagtcagtgtcgtcaagcttcctcgcctggtaccagcagaaaccgggacaagctccccgcctgctgatctacggagccagcagccgggccaccggtattcctgaccggttctccggttcggggtccgggaccgactttactctgactatctctcgcctcgagccagaggactccgccgtgtattactgccagcagtaccactcctccccgtcctggacgttcggacagggcacaaggctggagattaagaccactaccccagcaccgaggccacccaccccggctcctaccatcgcctcccagcctctgtccctgcgtccggaggcatgtagacccgcagctggtggggccgtgcatacccggggtcttgacttcgcctgcgatatctacatttgggcccctctggctggtacttgcggggtcctgctgctttcactcgtgatcactctttactgtaagcgcggtcggaagaagctgctgtacatctttaagcaacccttcatgaggcctgtgcagactactcaagaggaggacggctgttcatgccggttcccagaggaggaggaaggcggctgcgaactgcgcgtgaaattcagccgcagcgcagatgctccagcctacaagcaggggcagaaccagctctacaacgaactcaatcttggtcggagagaggagtacgacgtgctggacaagcggagaggacgggacccagaaatgggcgggaagccgcgcagaaagaatccccaagagggcctgtacaacgagctccaaaaggataagatggcagaagcctatagcgagattggtatgaaaggggaacgcagaagaggcaaaggccacgacggactgtaccagggactcagcaccgccaccaaggacacctatgacgctcttcacatgcaggccctgccgcctcgg

SEQ ID NO: 245 - DNA, 1476 bp, Artificial Sequence
  source: /note="Description of Artificial Sequence: Synthetic polynucleotide"
atggccctccctgtcaccgccctgctgcttccgctggctcttctgctccacgccgctcggcccgaggtgcagcttgtggaaaccggtggcggactggtgcagcccggaggaagcctcaggctgtcctgcgccgcgtccggcttcaccttctcctcgtacgccatgtcctgggtccgccaggcccccggaaagggcctggaatgggtgtccgccatctctggaagcggaggttccacgtactacgcggacagcgtcaagggaaggttcacaatctcccgcgataattcgaagaacactctgtaccttcaaatgaacaccctgaaggccgaggacactgctgtgtactactgcgcacgggccacctacaagagagagctccggtactactacggaatggacgtctggggccagggaactactgtgaccgtgtcctcgggagggggtggctccggggggggcggctccggcggaggcggttccgagattgtgctgacccagtcaccttcaactctgtcgctgtccccgggagagagcgctactctgagctgccgggccagccagtccgtgtccaccaccttcctcgcctggtatcagcagaagccggggcaggcaccacggctcttgatctacgggtcaagcaacagagcgaccggaattcctgaccgcttctcggggagcggttcaggcaccgacttcaccctgactatccggcgcctggaacccgaagatttcgccgtgtattactgtcaacagtaccactcctcgccgtcctggacctttggccaaggaaccaaagtggaaatcaagaccactaccccagcaccgaggccacccaccccggctcctaccatcgcctcccagcctctgtccctgcgtccggaggcatgtagacccgcagctggtggggccgtgcatacccggggtcttgacttcgcctgcgatatctacatttgggcccctctggctggtacttgcggggtcctgctgctttcactcgtgatcactctttactgtaagcgcggtcggaagaagctgctgtacatctttaagcaacccttcatgaggcctgtgcagactactcaagaggaggacggctgttcatgccggttcccagaggaggaggaaggcggctgcgaactgcgcgtgaaattcagccgcagcgcagatgctccagcctacaagcaggggcagaaccagctctacaacgaactcaatcttggtcggagagaggagtacgacgtgctggacaagcggagaggacgggacccagaaatgggcgggaagccgcgcagaaagaatccccaagagggcctgtacaacgagctccaaaaggataagatggcagaagcctatagcgagattggtatgaaaggggaacgcagaagaggcaaaggccacgacggactgtaccagggactcagcaccgccaccaaggacacctatgacgctcttcacatgcaggccctgccgcctcgg

SEQ ID NO: 246 - DNA, 1449 bp, Artificial Sequence
  source: /note="Description of Artificial Sequence: Synthetic polynucleotide"
atggccctccctgtcaccgccctgctgcttccgctggctcttctgctccacgccgctcggcccgaagtgcagctcgtggaaactggaggtggactcgtgcagcctggacggtcgctgcggctgagctgcgctgcatccggcttcaccttcgacgattatgccatgcactgggtcagacaggcgccagggaagggacttgagtgggtgtccggtatcagctggaatagcggctcaatcggatacgcggactccgtgaagggaaggttcaccatttcccgcgacaacgccaagaactccctgtacttgcaaatgaacagcctccgggatgaggacactgccgtgtactactgcgcccgcgtcggaaaagctgtgcccgacgtctggggccagggaaccactgtgaccgtgtccagcggcgggggtggatcgggcggtggagggtccggtggagggggctcagatattgtgatgacccagaccccctcgtccctgtccgcctcggtcggcgaccgcgtgactatcacatgtagagcctcgcagagcatctccagctacctgaactggtatcagcagaagccggggaaggccccgaagctcctgatctacgcggcatcatcactgcaatcgggagtgccgagccggttttccgggtccggctccggcaccgacttcacgctgaccatttcttccctgcaacccgaggacttcgccacttactactgccagcagtcctactccaccccttactccttcggccaaggaaccaggctggaaatcaagaccactaccccagcaccgaggccacccaccccggctcctaccatcgcctcccagcctctgtccctgcgtccggaggcatgtagacccgcagctggtggggccgtgcatacccggggtcttgacttcgcctgcgatatctacatttgggcccctctggctggtacttgcggggtcctgctgctttcactcgtgatcactctttactgtaagcgcggtcggaagaagctgctgtacatctttaagcaacccttcatgaggcctgtgcagactactcaagaggaggacggctgttcatgccggttcccagaggaggaggaaggcggctgcgaactgcgcgtgaaattcagccgcagcgcagatgctccagcctacaagcaggggcagaaccagctctacaacgaactcaatcttggtcggagagaggagtacgacgtgctggacaagcggagaggacgggacccagaaatgggcgggaagccgcgcagaaagaatccccaagagggcctgtacaacgagctccaaaaggataagatggcagaagcctatagcgagattggtatgaaaggggaacgcagaagaggcaaaggccacgacggactgtaccagggactcagcaccgccaccaaggacacctatgacgctcttcacatgcaggccctgccgcctcgg

SEQ ID NO: 247 - DNA, 1470 bp, Artificial Sequence
  source: /note="Description of Artificial Sequence: Synthetic polynucleotide"
atggccctccctgtcaccgccctgctgcttccgctggctcttctgctccacgccgctcggcccgaagtgcagctcgtggagagcgggggaggattggtgcagcccggaaggtccctgcggctctcctgcactgcgtctggcttcaccttcgacgactacgcgatgcactgggtcagacagcgcccgggaaagggcctggaatgggtcgcctcaatcaactggaagggaaactccctggcctatggcgacagcgtgaagggccgcttcgccatttcgcgcgacaacgccaagaacaccgtgtttctgcaaatgaattccctgcggaccgaggataccgctgtgtactactgcgccagccaccagggcgtggcatactataactacgccatggacgtgtggggaagagggacgctcgtcaccgtgtcctccgggggcggtggatcgggtggaggaggaagcggtggcgggggcagcgaaatcgtgctgactcagagcccgggaactctttcactgtccccgggagaacgggccactctctcgtgccgggccacccagtccatcggctcctccttccttgcctggtaccagcagaggccaggacaggcgccccgcctgctgatctacggtgcttcccaacgcgccactggcattcctgaccggttcagcggcagagggtcgggaaccgatttcacactgaccatttcccgggtggagcccgaagattcggcagtctactactgtcagcattacgagtcctccccttcatggaccttcggtcaagggaccaaagtggagatcaagaccactaccccagcaccgaggccacccaccccggctcctaccatcgcctcccagcctctgtccctgcgtccggaggcatgtagacccgcagctggtggggccgtgcatacccggggtcttgacttcgcctgcgatatctacatttgggcccctctggctggtacttgcggggtcctgctgctttcactcgtgatcactctttactgtaagcgcggtcggaagaagctgctgtacatctttaagcaacccttcatgaggcctgtgcagactactcaagaggaggacggctgttcatgccggttcccagaggaggaggaaggcggctgcgaactgcgcgtgaaattcagccgcagcgcagatgctccagcctacaagcaggggcagaaccagctctacaacgaactcaatcttggtcggagagaggagtacgacgtgctggacaagcggagaggacgggacccagaaatgggcgggaagccgcgcagaaagaatccccaagagggcctgtacaacgagctccaaaaggataagatggcagaagcctatagcgagattggtatgaaaggggaacgcagaagaggcaaaggccacgacggactgtaccagggactcagcaccgccaccaaggacacctatgacgctcttcacatgcaggccctgccgcctcgg

SEQ ID NO: 248 - DNA, 1455 bp, Artificial Sequence
  source: /note="Description of Artificial Sequence: Synthetic polynucleotide"
atggccctccctgtcaccgccctgctgcttccgctggctcttctgctccacgccgctcggcccgaggtgcagttggtcgaaagcgggggcgggcttgtgcagcctggcggatcactgcggctgtcctgcgcggcatcaggcttcacgttttcttcctacgccatgtcctgggtgcgccaggcccctggaaagggactggaatgggtgtccgcgatttcggggtccggcgggagcacctactacgccgattccgtgaagggccgcttcactatctcgcgggacaactccaagaacaccctctacctccaaatgaatagcctgcgggccgaggataccgccgtctactattgcgctaaggtcgtgcgcgacggaatggacgtgtggggacagggtaccaccgtgacagtgtcctcggggggaggcggtagcggcggaggaggaagcggtggtggaggttccgagattgtgctgactcaatcacccgcgaccctgagcctgtcccccggcgaaagggccactctgtcctgtcgggccagccaatcagtctcctcctcgtacctggcctggtaccagcagaagccaggacaggctccgagactccttatctatggcgcatcctcccgcgccaccggaatcccggataggttctcgggaaacggatcggggaccgacttcactctcaccatctcccggctggaaccggaggacttcgccgtgtactactgccagcagtacggcagcccgcctagattcactttcggccccggcaccaaagtggacatcaagaccactaccccagcaccgaggccacccaccccggctcctaccatcgcctcccagcctctgtccctgcgtccggaggcatgtagacccgcagctggtggggccgtgcatacccggggtcttgacttcgcctgcgatatctacatttgggcccctctggctggtacttgcggggtcctgctgctttcactcgtgatcactctttactgtaagcgcggtcggaagaagctgctgtacatctttaagcaacccttcatgaggcctgtgcagactactcaagaggaggacggctgttcatgccggttcccagaggaggaggaaggcggctgcgaactgcgcgtgaaattcagccgcagcgcagatgctccagcctacaagcaggggcagaaccagctctacaacgaactcaatcttggtcggagagaggagtacgacgtgctggacaagcggagaggacgggacccagaaatgggcgggaagccgcgcagaaagaatccccaagagggcctgtacaacgagctccaaaaggataagatggcagaagcctatagcgagattggtatgaaaggggaacgcagaagaggcaaaggccacgacggactgtaccagggactcagcaccgccaccaaggacacctatgacgctcttcacatgcaggccctgccgcctcgg

SEQ ID NO: 249 - DNA, 1458 bp, Artificial Sequence
  source: /note="Description of Artificial Sequence: Synthetic polynucleotide"
atggccctccctgtcaccgccctgctgcttccgctggctcttctgctccacgccgctcggcccgaagtgcagctgctggagtccggcggtggattggtgcaaccggggggatcgctcagactgtcctgtgcggcgtcaggcttcaccttctcgagctacgccatgtcatgggtcagacaggcccctggaaagggtctggaatgggtgtccgccatttccgggagcgggggatctacatactacgccgatagcgtgaagggccgcttcaccatttcccgggacaactccaagaacactctctatctgcaaatgaactccctccgcgctgaggacactgccgtgtactactgcgccaaaatccctcagaccggcaccttcgactactggggacaggggactctggtcaccgtcagcagcggtggcggaggttcggggggaggaggaagcggcggcggagggtccgagattgtgctgacccagtcacccggcactttgtccctgtcgcctggagaaagggccaccctttcctgccgggcatcccaatccgtgtcctcctcgtacctggcctggtaccagcagaggcccggacaggccccacggcttctgatctacggagcaagcagccgcgcgaccggtatcccggaccggttttcgggctcgggctcaggaactgacttcaccctcaccatctcccgcctggaacccgaagatttcgctgtgtattactgccagcactacggcagctccccgtcctggacgttcggccagggaactcggctggagatcaagaccactaccccagcaccgaggccacccaccccggctcctaccatcgcctcccagcctctgtccctgcgtccggaggcatgtagacccgcagctggtggggccgtgcatacccggggtcttgacttcgcctgcgatatctacatttgggcccctctggctggtacttgcggggtcctgctgctttcactcgtgatcactctttactgtaagcgcggtcggaagaagctgctgtacatctttaagcaacccttcatgaggcctgtgcagactactcaagaggaggacggctgttcatgccggttcccagaggaggaggaaggcggctgcgaactgcgcgtgaaattcagccgcagcgcagatgctccagcctacaagcaggggcagaaccagctctacaacgaactcaatcttggtcggagagaggagtacgacgtgctggacaagcggagaggacgggacccagaaatgggcgggaagccgcgcagaaagaatccccaagagggcctgtacaacgagctccaaaaggataagatggcagaagcctatagcgagattggtatgaaaggggaacgcagaagaggcaaaggccacgacggactgtaccagggactcagcaccgccaccaaggacacctatgacgctcttcacatgcaggccctgccgcctcgg

SEQ ID NO: 250 - DNA, 1476 bp, Artificial Sequence
  source: /note="Description of Artificial Sequence: Synthetic polynucleotide"
atggccctccctgtcaccgccctgctgcttccgctggctcttctgctccacgccgctcggcccgaagtgcaactggtggaaaccggtggaggactcgtgcagcctggcggcagcctccggctgagctgcgccgcttcgggattcaccttttcctcctacgcgatgtcttgggtcagacaggcccccggaaaggggctggaatgggtgtcagccatctccggctccggcggatcaacgtactacgccgactccgtgaaaggccggttcaccatgtcgcgcgagaatgacaagaactccgtgttcctgcaaatgaactccctgagggtggaggacaccggagtgtactattgtgcgcgcgccaactacaagagagagctgcggtactactacggaatggacgtctggggacagggaactatggtgaccgtgtcatccggtggagggggaagcggcggtggaggcagcgggggcgggggttcagaaattgtcatgacccagtccccgggaactctttccctctcccccggggaatccgcgactttgtcctgccgggccagccagcgcgtggcctcgaactacctcgcatggtaccagcataagccaggccaagccccttccctgctgatttccggggctagcagccgcgccactggcgtgccggataggttctcgggaagcggctcgggtaccgatttcaccctggcaatctcgcggctggaaccggaggattcggccgtgtactactgccagcactatgactcatccccctcctggacattcggacagggcaccaaggtcgagatcaagaccactaccccagcaccgaggccacccaccccggctcctaccatcgcctcccagcctctgtccctgcgtccggaggcatgtagacccgcagctggtggggccgtgcatacccggggtcttgacttcgcctgcgatatctacatttgggcccctctggctggtacttgcggggtcctgctgctttcactcgtgatcactctttactgtaagcgcggtcggaagaagctgctgtacatctttaagcaacccttcatgaggcctgtgcagactactcaagaggaggacggctgttcatgccggttcccagaggaggaggaaggcggctgcgaactgcgcgtgaaattcagccgcagcgcagatgctccagcctacaagcaggggcagaaccagctctacaacgaactcaatcttggtcggagagaggagtacgacgtgctggacaagcggagaggacgggacccagaaatgggcgggaagccgcgcagaaagaatccccaagagggcctgtacaacgagctccaaaaggataagatggcagaagcctatagcgagattggtatgaaaggggaacgcagaagaggcaaaggccacgacggactgtaccagggactcagcaccgccaccaaggacacctatgacgctcttcacatgcaggccctgccgcctcgg

SEQ ID NO: 251 - DNA, 1464 bp, Artificial Sequence
  source: /note="Description of Artificial Sequence: Synthetic polynucleotide"
atggccctccctgtcaccgccctgctgcttccgctggctcttctgctccacgccgctcggcccgaagtgcagctgctcgaaaccggtggagggctggtgcagccagggggctccctgaggctttcatgcgccgctagcggattctccttctcctcttacgccatgtcgtgggtccgccaagcccctggaaaaggcctggaatgggtgtccgcgatttccgggagcggaggttcgacctattacgccgactccgtgaagggccgctttaccatctcccgggataactccaagaacactctgtacctccaaatgaactcgctgagagccgaggacaccgccgtgtattactgcgcgaaggcgctggtcggcgcgactggggcattcgacatctggggacagggaactcttgtgaccgtgtcgagcggaggcggcggctccggcggaggagggagcgggggcggtggttccgaaatcgtgttgactcagtccccgggaaccctgagcttgtcacccggggagcgggccactctctcctgtcgcgcctcccaatcgctctcatccaatttcctggcctggtaccagcagaagcccggacaggccccgggcctgctcatctacggcgcttcaaactgggcaacgggaacccctgatcggttcagcggaagcggatcgggtactgactttaccctgaccatcaccagactggaaccggaggacttcgccgtgtactactgccagtactacggcacctcccccatgtacacattcggacagggtaccaaggtcgagattaagaccactaccccagcaccgaggccacccaccccggctcctaccatcgcctcccagcctctgtccctgcgtccggaggcatgtagacccgcagctggtggggccgtgcatacccggggtcttgacttcgcctgcgatatctacatttgggcccctctggctggtacttgcggggtcctgctgctttcactcgtgatcactctttactgtaagcgcggtcggaagaagctgctgtacatctttaagcaacccttcatgaggcctgtgcagactactcaagaggaggacggctgttcatgccggttcccagaggaggaggaaggcggctgcgaactgcgcgtgaaattcagccgcagcgcagatgctccagcctacaagcaggggcagaaccagctctacaacgaactcaatcttggtcggagagaggagtacgacgtgctggacaagcggagaggacgggacccagaaatgggcgggaagccgcgcagaaagaatccccaagagggcctgtacaacgagctccaaaaggataagatggcagaagcctatagcgagattggtatgaaaggggaacgcagaagaggcaaaggccacgacggactgtaccagggactcagcaccgccaccaaggacacctatgacgctcttcacatgcaggccctgccgcctcgg

SEQ ID NO: 252 - DNA, 1464 bp, Artificial Sequence
  source: /note="Description of Artificial Sequence: Synthetic polynucleotide"
atggccctccctgtcaccgccctgctgcttccgctggctcttctgctccacgccgctcggcccgaagtgcagctgcttgagagcggtggaggtctggtgcagcccgggggatcactgcgcctgtcctgtgccgcgtccggtttcactttctcctcgtacgccatgtcgtgggtcagacaggcaccgggaaagggactggaatgggtgtcagccatttcgggttcggggggcagcacctactacgctgactccgtgaagggccggttcaccatttcccgcgacaactccaagaacaccttgtacctccaaatgaactccctgcgggccgaagataccgccgtgtattactgcgtgctgtggttcggagagggattcgacccgtggggacaaggaacactcgtgactgtgtcatccggcggaggcggcagcggtggcggcggttccggcggcggcggatctgacatcgtgttgacccagtcccctctgagcctgccggtcactcctggcgaaccagccagcatctcctgccggtcgagccagtccctcctgcactccaatgggtacaactacctcgattggtatctgcaaaagccgggccagagcccccagctgctgatctaccttgggtcaaaccgcgcttccggggtgcctgatagattctccgggtccgggagcggaaccgactttaccctgaaaatctcgagggtggaggccgaggacgtcggagtgtactactgcatgcaggcgctccagactcccctgaccttcggaggaggaacgaaggtcgacatcaagaccactaccccagcaccgaggccacccaccccggctcctaccatcgcctcccagcctctgtccctgcgtccggaggcatgtagacccgcagctggtggggccgtgcatacccggggtcttgacttcgcctgcgatatctacatttgggcccctctggctggtacttgcggggtcctgctgctttcactcgtgatcactctttactgtaagcgcggtcggaagaagctgctgtacatctttaagcaacccttcatgaggcctgtgcagactactcaagaggaggacggctgttcatgccggttcccagaggaggaggaaggcggctgcgaactgcgcgtgaaattcagccgcagcgcagatgctccagcctacaagcaggggcagaaccagctctacaacgaactcaatcttggtcggagagaggagtacgacgtgctggacaagcggagaggacgggacccagaaatgggcgggaagccgcgcagaaagaatccccaagagggcctgtacaacgagctccaaaaggataagatggcagaagcctatagcgagattggtatgaaaggggaacgcagaagaggcaaaggccacgacggactgtaccagggactcagcaccgccaccaaggacacctatgacgctcttcacatgcaggccctgccgcctcgg

SEQ ID NO: 253 - DNA, 1485 bp, Artificial Sequence
  source: /note="Description of Artificial Sequence: Synthetic polynucleotide"
atggccctccctgtcaccgccctgctgcttccgctggctcttctgctccacgccgctcggccccaagtgcagctcgtggagtcaggcggaggactggtgcagcccgggggctccctgagactttcctgcgcggcatcgggttttaccttctcctcctatgctatgtcctgggtgcgccaggccccgggaaagggactggaatgggtgtccgcaatcagcggtagcgggggctcaacatactacgccgactccgtcaagggtcgcttcactatttcccgggacaactccaagaataccctgtacctccaaatgaacagcctcagggccgaggatactgccgtgtactactgcgccaaagtcggatacgatagctccggttactaccgggactactacggaatggacgtgtggggacagggcaccaccgtgaccgtgtcaagcggcggaggcggttcaggagggggaggctccggcggtggagggtccgaaatcgtcctgactcagtcgcctggcactctgtcgttgtccccgggggagcgcgctaccctgtcgtgtcgggcgtcgcagtccgtgtcgagctcctacctcgcgtggtaccagcagaagcccggacaggcccctagacttctgatctacggcacttcttcacgcgccaccgggatcagcgacaggttcagcggctccggctccgggaccgacttcaccctgaccattagccggctggagcctgaagatttcgccgtgtattactgccaacactacggaaactcgccgccaaagttcacgttcggacccggaaccaagctggaaatcaagaccactaccccagcaccgaggccacccaccccggctcctaccatcgcctcccagcctctgtccctgcgtccggaggcatgtagacccgcagctggtggggccgtgcatacccggggtcttgacttcgcctgcgatatctacatttgggcccctctggctggtacttgcggggtcctgctgctttcactcgtgatcactctttactgtaagcgcggtcggaagaagctgctgtacatctttaagcaacccttcatgaggcctgtgcagactactcaagaggaggacggctgttcatgccggttcccagaggaggaggaaggcggctgcgaactgcgcgtgaaattcagccgcagcgcagatgctccagcctacaagcaggggcagaaccagctctacaacgaactcaatcttggtcggagagaggagtacgacgtgctggacaagcggagaggacgggacccagaaatgggcgggaagccgcgcagaaagaatccccaagagggcctgtacaacgagctccaaaaggataagatggcagaagcctatagcgagattggtatgaaaggggaacgcagaagaggcaaaggccacgacggactgtaccagggactcagcaccgccaccaaggacacctatgacgctcttcacatgcaggccctgccgcctcgg

SEQ ID NO: 254 - DNA, 1470 bp, Artificial Sequence
  source: /note="Description of Artificial Sequence: Synthetic polynucleotide"
atggccctccctgtcaccgccctgctgcttccgctggctcttctgctccacgccgctcggcccgaagtccaactggtggagtccgggggagggctcgtgcagcccggaggcagccttcggctgtcgtgcgccgcctccgggttcacgttctcatcctacgcgatgtcgtgggtcagacaggcaccaggaaagggactggaatgggtgtccgccattagcggctccggcggtagcacctactatgccgactcagtgaagggaaggttcactatctcccgcgacaacagcaagaacaccctgtacctccaaatgaactctctgcgggccgaggataccgcggtgtactattgcgccaagatgggttggtccagcggatacttgggagccttcgacatttggggacagggcactactgtgaccgtgtcctccgggggtggcggatcgggaggcggcggctcgggtggagggggttccgaaatcgtgttgacccagtcaccgggaaccctctcgctgtccccgggagaacgggctacactgtcatgtagagcgtcccagtccgtggcttcctcgttcctggcctggtaccagcagaagccgggacaggcaccccgcctgctcatctacggagccagcggccgggcgaccggcatccctgaccgcttctccggttccggctcgggcaccgactttactctgaccattagcaggcttgagcccgaggattttgccgtgtactactgccaacactacggggggagccctcgcctgaccttcggaggcggaactaaggtcgatatcaaaaccactaccccagcaccgaggccacccaccccggctcctaccatcgcctcccagcctctgtccctgcgtccggaggcatgtagacccgcagctggtggggccgtgcatacccggggtcttgacttcgcctgcgatatctacatttgggcccctctggctggtacttgcggggtcctgctgctttcactcgtgatcactctttactgtaagcgcggtcggaagaagctgctgtacatctttaagcaacccttcatgaggcctgtgcagactactcaagaggaggacggctgttcatgccggttcccagaggaggaggaaggcggctgcgaactgcgcgtgaaattcagccgcagcgcagatgctccagcctacaagcaggggcagaaccagctctacaacgaactcaatcttggtcggagagaggagtacgacgtgctggacaagcggagaggacgggacccagaaatgggcgggaagccgcgcagaaagaatccccaagagggcctgtacaacgagctccaaaaggataagatggcagaagcctatagcgagattggtatgaaaggggaacgcagaagaggcaaaggccacgacggactgtaccagggactcagcaccgccaccaaggacacctatgacgctcttcacatgcaggccctgccgcctcgg

SEQ ID NO: 255 - protein, 122 aa, Artificial Sequence
  source: /note="Description of Artificial Sequence: Synthetic polypeptide"
QIQLVQSGPDLKKPGETVKLSCKASGYTFTNFGMNWVKQAPGKGFKWMAWINTYTGESYFADDFKGRFAFSVETSATTAYLQINNLKTEDTATYFCARGEIYYGYDGGFAYWGQGTLVTVSA

SEQ ID NO: 256 - protein, 117 aa, Artificial Sequence
  source: /note="Description of Artificial Sequence: Synthetic polypeptide"
QIQLVQSGPELKKPGETVKISCKASGYTFTDYSINWVKRAPGKGLKWMGWINTETREPAYAYDFRGRFAFSLETSASTAYLQINNLKYEDTATYFCALDYSYAMDYWGQGTSVTVSS

SEQ ID NO: 257 - protein, 117 aa, Artificial Sequence
  source: /note="Description of Artificial Sequence: Synthetic polypeptide"
QIQLVQSGPELKKPGETVKISCKASGYTFRHYSMNWVKQAPGKGLKWMGRINTESGVPIYADDFKGRFAFSVETSASTAYLVINNLKDEDTASYFCSNDYLYSLDFWGQGTALTVSS

SEQ ID NO: 258 - protein, 117 aa, Artificial Sequence
  source: /note="Description of Artificial Sequence: Synthetic polypeptide"
QIQLVQSGPELKKPGETVKISCKASGYTFTHYSMNWVKQAPGKGLKWMGRINTETGEPLYADDFKGRFAFSLETSASTAYLVINNLKNEDTATFFCSNDYLYSCDYWGQGTTLTVSS

SEQ ID NO: 259 - protein, 107 aa, Artificial Sequence
  source: /note="Description of Artificial Sequence: Synthetic polypeptide"
DVVMTQSHRFMSTSVGDRVSITCRASQDVNTAVSWYQQKPGQSPKLLIFSASYRYTGVPDRFTGSGSGADFTLTISSVQAEDLAVYYCQQHYSTPWTFGGGTKLDIK

SEQ ID NO: 260 - protein, 111 aa, Artificial Sequence
  source: /note="Description of Artificial Sequence: Synthetic polypeptide"
DIVLTQSPASLAMSLGKRATISCRASESVSVIGAHLIHWYQQKPGQPPKLLIYLASNLETGVPARFSGSGSGTDFTLTIDPVEEDDVAIYSCLQSRIFPRTFGGGTKLEIK

SEQ ID NO: 261 - protein, 111 aa, Artificial Sequence
  source: /note="Description of Artificial Sequence: Synthetic polypeptide"
DIVLTQSPPSLAMSLGKRATISCRASESVTILGSHLIYWYQQKPGQPPTLLIQLASNVQTGVPARFSGSGSRTDFTLTIDPVEEDDVAVYYCLQSRTIPRTFGGGTKLEIK

SEQ ID NO: 262 - protein, 111 aa, Artificial Sequence; identical to SEQ ID NO: 261
  source: /note="Description of Artificial Sequence: Synthetic polypeptide"

SEQ ID NO: 263 - protein, 244 aa, Artificial Sequence
  source: /note="Description of Artificial Sequence: Synthetic polypeptide"
QIQLVQSGPDLKKPGETVKLSCKASGYTFTNFGMNWVKQAPGKGFKWMAWINTYTGESYFADDFKGRFAFSVETSATTAYLQINNLKTEDTATYFCARGEIYYGYDGGFAYWGQGTLVTVSAGGGGSGGGGSGGGGSDVVMTQSHRFMSTSVGDRVSITCRASQDVNTAVSWYQQKPGQSPKLLIFSASYRYTGVPDRFTGSGSGADFTLTISSVQAEDLAVYYCQQHYSTPWTFGGGTKLDIK

SEQ ID NO: 264 - protein, 249 aa, Artificial Sequence
  source: /note="Description of Artificial Sequence: Synthetic polypeptide"
QIQLVQSGPELKKPGETVKISCKASGYTFTDYSINWVKRAPGKGLKWMGWINTETREPAYAYDFRGRFAFSLETSASTAYLQINNLKYEDTATYFCALDYSYAMDYWGQGTSVTVSSGGGGSGGGGSGGGGSQIQLVQSGPELKKPGETVKISCKASGYTFTDYSINWVKRAPGKGLKWMGWINTETREPAYAYDFRGRFAFSLETSASTAYLQINNLKYEDTATYFCALDYSYAMDYWGQGTSVTVSS

SEQ ID NO: 265 - protein, 243 aa, Artificial Sequence
  source: /note="Description of Artificial Sequence: Synthetic polypeptide"
QIQLVQSGPELKKPGETVKISCKASGYTFRHYSMNWVKQAPGKGLKWMGRINTESGVPIYADDFKGRFAFSVETSASTAYLVINNLKDEDTASYFCSNDYLYSLDFWGQGTALTVSSGGGGSGGGGSGGGGSDIVLTQSPPSLAMSLGKRATISCRASESVTILGSHLIYWYQQKPGQPPTLLIQLASNVQTGVPARFSGSGSRTDFTLTIDPVEEDDVAVYYCLQSRTIPRTFGGGTKLEIK

SEQ ID NO: 266 - protein, 243 aa, Artificial Sequence
  source: /note="Description of Artificial Sequence: Synthetic polypeptide"
QIQLVQSGPELKKPGETVKISCKASGYTFTHYSMNWVKQAPGKGLKWMGRINTETGEPLYADDFKGRFAFSLETSASTAYLVINNLKNEDTATFFCSNDYLYSCDYWGQGTTLTVSSGGGGSGGGGSGGGGSDIVLTQSPPSLAMSLGKRATISCRASESVTILGSHLIYWYQQKPGQPPTLLIQLASNVQTGVPARFSGSGSRTDFTLTIDPVEEDDVAVYYCLQSRTIPRTFGGGTKLEIK

SEQ ID NO: 267 - protein, 467 aa, Artificial Sequence
  source: /note="Description of Artificial Sequence: Synthetic polypeptide"
QIQLVQSGPDLKKPGETVKLSCKASGYTFTNFGMNWVKQAPGKGFKWMAWINTYTGESYFADDFKGRFAFSVETSATTAYLQINNLKTEDTATYFCARGEIYYGYDGGFAYWGQGTLVTVSAGGGGSGGGGSGGGGSDVVMTQSHRFMSTSVGDRVSITCRASQDVNTAVSWYQQKPGQSPKLLIFSASYRYTGVPDRFTGSGSGADFTLTISSVQAEDLAVYYCQQHYSTPWTFGGGTKLDIKTTTPAPRPPTPAPTIASQPLSLRPEACRPAAGGAVHTRGLDFACDIYIWAPLAGTCGVLLLSLVITLYCKRGRKKLLYIFKQPFMRPVQTTQEEDGCSCRFPEEEEGGCELRVKFSRSADAPAYKQGQNQLYNELNLGRREEYDVLDKRRGRDPEMGGKPRRKNPQEGLYNELQKDKMAEAYSEIGMKGERRRGKGHDGLYQGLSTATKDTYDALHMQALPPR

SEQ ID NO: 268 - protein, 472 aa, Artificial Sequence
  source: /note="Description of Artificial Sequence: Synthetic polypeptide"
QIQLVQSGPELKKPGETVKISCKASGYTFTDYSINWVKRAPGKGLKWMGWINTETREPAYAYDFRGRFAFSLETSASTAYLQINNLKYEDTATYFCALDYSYAMDYWGQGTSVTVSSGGGGSGGGGSGGGGSQIQLVQSGPELKKPGETVKISCKASGYTFTDYSINWVKRAPGKGLKWMGWINTETREPAYAYDFRGRFAFSLETSASTAYLQINNLKYEDTATYFCALDYSYAMDYWGQGTSVTVSSTTTPAPRPPTPAPTIASQPLSLRPEACRPAAGGAVHTRGLDFACDIYIWAPLAGTCGVLLLSLVITLYCKRGRKKLLYIFKQPFMRPVQTTQEEDGCSCRFPEEEEGGCELRVKFSRSADAPAYKQGQNQLYNELNLGRREEYDVLDKRRGRDPEMGGKPRRKNPQEGLYNELQKDKMAEAYSEIGMKGERRRGKGHDGLYQGLSTATKDTYDALHMQALPPR

SEQ ID NO: 269 - protein, 466 aa, Artificial Sequence
  source: /note="Description of Artificial Sequence: Synthetic polypeptide"
QIQLVQSGPELKKPGETVKISCKASGYTFRHYSMNWVKQAPGKGLKWMGRINTESGVPIYADDFKGRFAFSVETSASTAYLVINNLKDEDTASYFCSNDYLYSLDFWGQGTALTVSSGGGGSGGGGSGGGGSDIVLTQSPPSLAMSLGKRATISCRASESVTILGSHLIYWYQQKPGQPPTLLIQLASNVQTGVPARFSGSGSRTDFTLTIDPVEEDDVAVYYCLQSRTIPRTFGGGTKLEIKTTTPAPRPPTPAPTIASQPLSLRPEACRPAAGGAVHTRGLDFACDIYIWAPLAGTCGVLLLSLVITLYCKRGRKKLLYIFKQPFMRPVQTTQEEDGCSCRFPEEEEGGCELRVKFSRSADAPAYKQGQNQLYNELNLGRREEYDVLDKRRGRDPEMGGKPRRKNPQEGLYNELQKDKMAEAYSEIGMKGERRRGKGHDGLYQGLSTATKDTYDALHMQALPPR

SEQ ID NO: 270 - protein, 466 aa, Artificial Sequence
  source: /note="Description of Artificial Sequence: Synthetic polypeptide"
QIQLVQSGPELKKPGETVKISCKASGYTFTHYSMNWVKQAPGKGLKWMGRINTETGEPLYADDFKGRFAFSLETSASTAYLVINNLKNEDTATFFCSNDYLYSCDYWGQGTTLTVSSGGGGSGGGGSGGGGSDIVLTQSPPSLAMSLGKRATISCRASESVTILGSHLIYWYQQKPGQPPTLLIQLASNVQTGVPARFSGSGSRTDFTLTIDPVEEDDVAVYYCLQSRTIPRTFGGGTKLEIKTTTPAPRPPTPAPTIASQPLSLRPEACRPAAGGAVHTRGLDFACDIYIWAPLAGTCGVLLLSLVITLYCKRGRKKLLYIFKQPFMRPVQTTQEEDGCSCRFPEEEEGGCELRVKFSRSADAPAYKQGQNQLYNELNLGRREEYDVLDKRRGRDPEMGGKPRRKNPQEGLYNELQKDKMAEAYSEIGMKGERRRGKGHDGLYQGLSTATKDTYDALHMQALPPR

SEQ ID NO: 271 - protein, 249 aa, Artificial Sequence
  source: /note="Description of Artificial Sequence: Synthetic polypeptide"
QVQLVQSGAEVKKPGSSVKVSCKASGGTFSNYWMHWVRQAPGQGLEWMGATYRGHSDTYYNQKFKGRVTITADKSTSTAYMELSSLRSEDTAVYYCARGAIYNGYDVLDNWGQGTLVTVSSGGGGSGGGGSGGGGSGGGGSDIQMTQSPSSLSASVGDRVTITCSASQDISNYLNWYQQKPGKAPKLLIYYTSNLHSGVPSRFSGSGSGTDFTLTISSLQPEDFATYYCQQYRKLPWTFGQGTKLEIKR

SEQ ID NO: 272 - DNA, 747 bp, Artificial Sequence
  source: /note="Description of Artificial Sequence: Synthetic polynucleotide"
caggtgcagctggtccagagcggcgccgaagtgaagaagcccggcagctccgtgaaagtgagctgcaaggccagcggcggcaccttcagcaactactggatgcactgggtgaggcaggcccccggacagggcctggagtggatgggcgccacctacaggggccacagcgacacctactacaaccagaagttcaagggccgggtgaccatcaccgccgacaagagcaccagcaccgcctacatggaactgagcagcctcaggagcgaggacaccgctgtgtattactgcgccaggggcgccatctacaacggctacgacgtgctggacaactggggccagggcacactagtgaccgtgtccagcggtggaggaggtagcggaggaggcgggagcggtggaggtggctctggaggtggcggaagcgacatccagatgacccagagccctagctcactgagcgccagcgtgggcgacagggtgaccattacctgctccgccagccaggacatcagcaactacctgaactggtaccagcagaagcccggcaaggcccccaagctgctgatctactacacctccaacctgcactccggcgtgcccagcaggttcagcggaagcggcagcggcaccgatttcaccctgaccatctccagcctgcagcccgaggacttcgccacctactactgccagcagtacaggaagctcccctggactttcggccagggcaccaaactggagatcaagcgt

SEQ ID NO: 273 - protein, 249 aa, Artificial Sequence
  source: /note="Description of Artificial Sequence: Synthetic polypeptide"
DIQMTQSPSSLSASVGDRVTITCSASQDISNYLNWYQQKPGKAPKLLIYYTSNLHSGVPSRFSGSGSGTDFTLTISSLQPEDFATYYCQQYRKLPWTFGQGTKLEIKRGGGGSGGGGSGGGGSGGGGSQVQLVQSGAEVKKPGSSVKVSCKASGGTFSNYWMHWVRQAPGQGLEWMGATYRGHSDTYYNQKFKGRVTITADKSTSTAYMELSSLRSEDTAVYYCARGAIYNGYDVLDNWGQGTLVTVSS

SEQ ID NO: 274 - DNA, 747 bp, Artificial Sequence
  source: /note="Description of Artificial Sequence: Synthetic polynucleotide"
gacatccagatgacccagagccctagctcactgagcgccagcgtgggcgacagggtgaccattacctgctccgccagccaggacatcagcaactacctgaactggtaccagcagaagcccggcaaggcccccaagctgctgatctactacacctccaacctgcactccggcgtgcccagcaggttcagcggaagcggcagcggcaccgatttcaccctgaccatctccagcctgcagcccgaggacttcgccacctactactgccagcagtacaggaagctcccctggactttcggccagggcaccaaactggagatcaagcgtggtggaggaggtagcggaggaggcgggagcggtggaggtggctctggaggtggcggaagccaggtgcagctggtccagagcggcgccgaagtgaagaagcccggcagctccgtgaaagtgagctgcaaggccagcggcggcaccttcagcaactactggatgcactgggtgaggcaggcccccggacagggcctggagtggatgggcgccacctacaggggccacagcgacacctactacaaccagaagttcaagggccgggtgaccatcaccgccgacaagagcaccagcaccgcctacatggaactgagcagcctcaggagcgaggacaccgctgtgtattactgcgccaggggcgccatctacaacggctacgacgtgctggacaactggggccagggcacactagtgaccgtgtccagc

SEQ ID NO: 275 - protein, 132 aa, Artificial Sequence
  source: /note="Description of Artificial Sequence: Synthetic polypeptide"
DVPDYASLGGPSSPKKKRKVSRGVQVETISPGDGRTFPKRGQTCVVHYTGMLEDGKKFDSSRDRNKPFKFMLGKQEVIRGWEEGVAQMSVGQRAKLTISPDYAYGATGHPGIIPPHATLVFDVELLKLETSY

SEQ ID NO: 276 - protein, 108 aa, Artificial Sequence
  source: /note="Description of Artificial Sequence: Synthetic polypeptide"
VQVETISPGDGRTFPKRGQTCVVHYTGMLEDGKKFDSSRDRNKPFKFMLGKQEVIRGWEEGVAQMSVGQRAKLTISPDYAYGATGHPGIIPPHATLVFDVELLKLETS

SEQ ID NO: 277 - protein, 93 aa, Artificial Sequence [sequence omitted]

SEQ ID NO: 278 - protein, 95 aa, Artificial Sequence
  source: /note="Description of Artificial Sequence: Synthetic polypeptide"
ILWHEMWHEGLIEASRLYFGERNVKGMFEVLEPLHAMMERGPQTLKETSFNQAYGRDLMEAQEWCRKYMKSGNVKDLTQAWDLYYHVFRRISKTS

SEQ ID NO: 279 - protein, 95 aa, Artificial Sequence
  source: /note="Description of Artificial Sequence: Synthetic polypeptide"
ILWHEMWHEGLLEASRLYFGERNVKGMFEVLEPLHAMMERGPQTLKETSFNQAYGRDLMEAQEWCRKYMKSGNVKDLTQAWDLYYHVFRRISKTS

SEQ ID NO: 280 - protein, 95 aa, Artificial Sequence
  source: /note="Description of Artificial Sequence: Synthetic polypeptide"
ILWHEMWHEGLEEASRLYFGERNVKGMFEVLEPLHAMMERGPQTLKETSFNQAYGRDLMEAQEWCRKYMKSGNVKDLLQAWDLYYHVFRRISKTS

SEQ ID NO: 281 - protein, 95 aa, Artificial Sequence
  source: /note="Description of Artificial Sequence: Synthetic polypeptide"
  MOD_RES (12)..(12): Any amino acid
  MOD_RES (78)..(78): Any amino acid
ILWHEMWHEGLXEASRLYFGERNVKGMFEVLEPLHAMMERGPQTLKETSFNQAYGRDLMEAQEWCRKYMKSGNVKDLXQAWDLYYHVFRRISKTS

SEQ ID NO: 282 - protein, 95 aa, Artificial Sequence
  source: /note="Description of Artificial Sequence: Synthetic polypeptide"
ILWHEMWHEGLIEASRLYFGERNVKGMFEVLEPLHAMMERGPQTLKETSFNQAYGRDLMEAQEWCRKYMKSGNVKDLLQAWDLYYHVFRRISKTS

SEQ ID NO: 283 - protein, 95 aa, Artificial Sequence
  source: /note="Description of Artificial Sequence: Synthetic polypeptide"
ILWHEMWHEGLLEASRLYFGERNVKGMFEVLEPLHAMMERGPQTLKETSFNQAYGRDLMEAQEWCRKYMKSGNVKDLLQAWDLYYHVFRRISKTS

SEQ ID NO: 284 - protein, 1132 aa, Artificial Sequence [sequence omitted]

SEQ ID NO: 285 - DNA, 4027 bp, Artificial Sequence
  source: /note="Description of Artificial Sequence: Synthetic polynucleotide"
caggcagcgtggtcctgctgcgcacgtgggaagccctggccccggccacccccgcgatgccgcgcgctccccgctgccgagccgtgcgctccctgctgcgcagccactaccgcgaggtgctgccgctggccacgttcgtgcggcgcctggggccccagggctggcggctggtgcagcgcggggacccggcggctttccgcgcgctggtggcccagtgcctggtgtgcgtgccctgggacgcacggccgccccccgccgccccctccttccgccaggtgtcctgcctgaaggagctggtggcccgagtgctgcagaggctgtgcgagcgcggcgcgaagaacgtgctggccttcggcttcgcgctgctggacggggcccgcgggggcccccccgaggccttcaccaccagcgtgcgcagctacctgcccaacacggtgaccgacgcactgcgggggagcggggcgtgggggctgctgttgcgccgcgtgggcgacgacgtgctggttcacctgctggcacgctgcgcgctctttgtgctggtggctcccagctgcgcctaccaggtgtgcgggccgccgctgtaccagctcggcgctgccactcaggcccggcccccgccacacgctagtggaccccgaaggcgtctgggatgcgaacgggcctggaaccatagcgtcagggaggccggggtccccctgggcctgccagccccgggtgcgaggaggcgcgggggcagtgccagccgaagtctgccgttgcccaagaggcccaggcgtggcgctgcccctgagccggagcggacgcccgttgggcaggggtcctgggcccacccgggcaggacgcgtggaccgagtgaccgtggtttctgtgtggtgtcacctgccagacccgccgaagaagccacctctttggagggtgcgctctctggcacgcgccactcccacccatccgtgggccgccagcaccacgcgggccccccatccacatcgcggccaccacgtccctgggacacgccttgtcccccggtgtacgccgagaccaagcacttcctctactcctcaggcgacaaggagcagctgcggccctccttcctactcagctctctgaggcccagcctgactggcgctcggaggctcgtggagaccatctttctgggttccaggccctggatgccagggactccccgcaggttgccccgcctgccccagcgctactggcaaatgcggcccctgtttctggagctgcttgggaaccacgcgcagtgcccctacggggtgctcctcaagacgcactgcccgctgcgagctgcggtcaccccagcagccggtgtctgtgcccgggagaagccccagggctctgtggcggcccccgaggaggaggacacagacccccgtcgcctggtgcagctgctccgccagcacagcagcccctggcaggtgtacggcttcgtgcgggcctgcctgcgccggctggtgcccccaggcctctggggctccaggcacaacgaacgccgcttcctcaggaacaccaagaagttcatctccctggggaagcatgccaagctctcgctgcaggagctgacgtggaagatgagcgtgcggggctgcgcttggctgcgcaggagcccaggggttggctgtgttccggccgcagagcaccgtctgcgtgaggagatcctggccaagttcctgcactggctgatgagtgtgtacgtcgtcgagctgctcaggtctttcttttatgtcacggagaccacgtttcaaaagaacaggctctttttctaccggaagagtgtctggagcaagttgcaaagcattggaatcagacagcacttgaagagggtgcagctgcgggagctgtcggaagcagaggtcaggcagcatcgggaagccaggcccgccctgctgacgtccagactccgcttcatccccaagcctgacgggctgcggccgattgtgaacatggactacgtcgtgggagccagaacgttccgcagagaaaagagggccgagcgtctcacctcgagggtgaaggcactgttcagcgtgctcaactacgagcgggcgcggcgccccggcctcctgggcgcctctgtgctgggcctggacgatatccacagggcctggcgcaccttcgtgctgcgtgtgcgggcccaggacccgccgcctgagctgtactttgtcaaggtggatgtgacgggcgcgtacgacaccatcccccaggacaggctcacggaggtcatcgccagcatcatcaaaccccagaacacgtactgcgtgcgtcggtatgccgtggtccagaaggccgcccatgggcacgtccgcaaggccttcaagagccacgtctctaccttgacagacctccagccgtacatgcgacagttcgtggctcacctgcaggagaccagcccgctgagggatgccgtcgtcatcgagcagagctcctccctgaatgaggccagcagtggcctcttcgacgtcttcctacgcttcatgtgccaccacgccgtgcgcatcaggggcaagtcctacgtccagtgccaggggatcccgcagggctccatcctctccacgctgctctgcagcctgtgctacggcgacatggagaacaagctgtttgcggggattcggcgggacgggctgctcctgcgtttggtggatgatttcttgttggtgacacctcacctcacccacgcgaaaaccttcctcaggaccctggtccgaggtgtccctgagtatggctgcgtggtgaacttgcggaagacagtggtgaacttccctgtagaagacgaggccctgggtggcacggcttttgttcagatgccggcccacggcctattcccctggtgcggcctgctgctggatacccggaccctggaggtgcagagcgactactccagctatgcccggacctccatcagagccagtctcaccttcaaccgcggcttcaaggctgggaggaacatgcgtcgcaaactctttggggtcttgcggctgaagtgtcacagcctgtttctggatttgcaggtgaacagcctccagacggtgtgcaccaacatctacaagatcctcctgctgcaggcgtacaggtttcacgcatgtgtgctgcagctcccatttcatcagcaagtttggaagaaccccacatttttcctgcgcgtcatctctgacacggcctccctctgctactccatcctgaaagccaagaacgcagggatgtcgctgggggccaagggcgccgccggccctctgccctccgaggccgtgcagtggctgtgccaccaagcattcctgctcaagctgactcgacaccgtgtcacctacgtgccactcctggggtcactcaggacagcccagacgcagctgagtcggaagctcccggggacgacgctgactgccctggaggccgcagccaacccggcactgccctcagacttcaagaccatcctggactgatggccacccgcccacagccaggccgagagcagacaccagcagccctgtcacgccgggctctacgtcccagggagggaggggcggcccacacccaggcccgcaccgctgggagtctgaggcctgagtgagtgtttggccgaggcctgcatgtccggctgaaggctgagtgtccggctgaggcctgagcgagtgtccagccaagggctgagtgtccagcacacctgccgtcttcacttccccacaggctggcgctcggctccaccccagggccagcttttcctcaccaggagcccggcttccactccccacataggaatagtccatccccagattcgccattgttcacccctcgccctgccctcctttgccttccacccccaccatccaggtggagaccctgagaaggaccctgggagctctgggaatttggagtgaccaaaggtgtgccctgtacacaggcgaggaccctgcacctggatgggggtccctgtgggtcaaattggggggaggtgctgtgggagtaaaatactgaatatatgagtttttcagttttgaaaaaaaaaaaaaaaaaa

SEQ ID NO: 286 - DNA, 19 bp, Artificial Sequence
  source: /note="Description of Artificial Sequence: Synthetic oligonucleotide"
ggaggtccctcaccttcta

SEQ ID NO: 287 - DNA, 19 bp, Artificial Sequence
  source: /note="Description of Artificial Sequence: Synthetic oligonucleotide"
cggaggatcttatgctgaa

SEQ ID NO: 288 - DNA, 19 bp, Artificial Sequence
  source: /note="Description of Artificial Sequence: Synthetic oligonucleotide"
cccgcttccagatcataca

SEQ ID NO: 289 - DNA, 19 bp, Artificial Sequence
  source: /note="Description of Artificial Sequence: Synthetic oligonucleotide"
ggagacctcaacaagatat

SEQ ID NO: 290 - DNA, 19 bp, Artificial Sequence
  source: /note="Description of Artificial Sequence: Synthetic oligonucleotide"
aaggcatggtcattggtat

SEQ ID NO: 291 - DNA, 19 bp, Artificial Sequence
  source: /note="Description of Artificial Sequence: Synthetic oligonucleotide"
gcatggtcattggtatcat

SEQ ID NO: 292 - DNA, 19 bp, Artificial Sequence
  source: /note="Description of Artificial Sequence: Synthetic oligonucleotide"
ggtcattggtatcatgagt

SEQ ID NO: 293 - DNA, 19 bp, Artificial Sequence
  source: /note="Description of Artificial Sequence: Synthetic oligonucleotide"
cctagtgggtatccctgta

SEQ ID NO: 294 - DNA, 19 bp, Artificial Sequence
  source: /note="Description of Artificial Sequence: Synthetic oligonucleotide"
gaggatggacattgttctt

SEQ ID NO: 295 - DNA, 19 bp, Artificial Sequence
  source: /note="Description of Artificial Sequence: Synthetic oligonucleotide"
gcatgcaggctacagttca

SEQ ID NO: 296 - DNA, 19 bp, Artificial Sequence
  source: /note="Description of Artificial Sequence: Synthetic oligonucleotide"
ccagcacatgcactgttga

SEQ ID NO: 297 - DNA, 19 bp, Artificial Sequence
  source: /note="Description of Artificial Sequence: Synthetic oligonucleotide"
cacatgcactgttgagtga

SEQ ID NO: 298 - DNA, 21 bp, Artificial Sequence
  source: /note="Description of Artificial Sequence: Synthetic oligonucleotide"
ctggaggtccctcaccttcta

SEQ ID NO: 299 - DNA, 21 bp, Artificial Sequence
  source: /note="Description of Artificial Sequence: Synthetic oligonucleotide"
gtcggaggatcttatgctgaa

SEQ ID NO: 300 - DNA, 21 bp, Artificial Sequence
  source: /note="Description of Artificial Sequence: Synthetic oligonucleotide"
tgcccgcttccagatcataca

SEQ ID NO: 301 - DNA, 21 bp, Artificial Sequence
  source: /note="Description of Artificial Sequence: Synthetic oligonucleotide"
ctggagacctcaacaagatat

SEQ ID NO: 302 - DNA, 21 bp, Artificial Sequence
  source: /note="Description of Artificial Sequence: Synthetic oligonucleotide"
tcaaggcatggtcattggtat

SEQ ID NO: 303 - DNA, 21 bp, Artificial Sequence
  source: /note="Description of Artificial Sequence: Synthetic oligonucleotide"
aggcatggtcattggtatcat

SEQ ID NO: 304 - DNA, 21 bp, Artificial Sequence
  source: /note="Description of Artificial Sequence: Synthetic oligonucleotide"
atggtcattggtatcatgagt

SEQ ID NO: 305 - DNA, 21 bp, Artificial Sequence
  source: /note="Description of Artificial Sequence: Synthetic oligonucleotide"
gccctagtgggtatccctgta

SEQ ID NO: 306 - DNA, 21 bp, Artificial Sequence
  source: /note="Description of Artificial Sequence: Synthetic oligonucleotide"
atgaggatggacattgttctt

SEQ ID NO: 307 - DNA, 21 bp, Artificial Sequence
  source: /note="Description of Artificial Sequence: Synthetic oligonucleotide"
gagcatgcaggctacagttca

SEQ ID NO: 308 - DNA, 21 bp, Artificial Sequence
  source: /note="Description of Artificial Sequence: Synthetic oligonucleotide"
ttccagcacatgcactgttga

SEQ ID NO: 309 - DNA, 21 bp, Artificial Sequence
  source: /note="Description of Artificial Sequence: Synthetic oligonucleotide"
agcacatgcactgttgagtga

SEQ ID NO: 310 - DNA, 21 bp, Artificial Sequence
  source: /note="Description of Artificial Sequence: Synthetic oligonucleotide"
tagaaggtgagggacctccag

SEQ ID NO: 311 - DNA, 21 bp, Artificial Sequence
  source: /note="Description of Artificial Sequence: Synthetic oligonucleotide"
ttcagcataagatcctccgac

SEQ ID NO: 312 - DNA, 21 bp, Artificial Sequence
  source: /note="Description of Artificial Sequence: Synthetic oligonucleotide"
tgtatgatctggaagcgggca

SEQ ID NO: 313 - DNA, 21 bp, Artificial Sequence
  source: /note="Description of Artificial Sequence: Synthetic oligonucleotide"
atatcttgttgaggtctccag

SEQ ID NO: 314 - DNA, 21 bp, Artificial Sequence
  source: /note="Description of Artificial Sequence: Synthetic oligonucleotide"
ataccaatgaccatgccttga

SEQ ID NO: 315 - DNA, 21 bp, Artificial Sequence
  source: /note="Description of Artificial Sequence: Synthetic oligonucleotide"
atgataccaatgaccatgcct

SEQ ID NO: 316 - DNA, 21 bp, Artificial Sequence
  source: /note="Description of Artificial Sequence: Synthetic oligonucleotide"
atggtcattggtatcatgagt

SEQ ID NO: 317 - DNA, 21 bp, Artificial Sequence
  source: /note="Description of Artificial Sequence: Synthetic oligonucleotide"
gccctagtgggtatccctgta

SEQ ID NO: 318 - DNA, 21 bp, Artificial Sequence
  source: /note="Description of Artificial Sequence: Synthetic oligonucleotide"
atgaggatggacattgttctt

SEQ ID NO: 319 - DNA, 21 bp, Artificial Sequence
  source: /note="Description of Artificial Sequence: Synthetic oligonucleotide"
gagcatgcaggctacagttca

SEQ ID NO: 320 - DNA, 21 bp, Artificial Sequence
  source: /note="Description of Artificial Sequence: Synthetic oligonucleotide"
ttccagcacatgcactgttga

SEQ ID NO: 321 - DNA, 21 bp, Artificial Sequence
  source: /note="Description of Artificial Sequence: Synthetic oligonucleotide"
agcacatgcactgttgagtga

SEQ ID NO: 322 - DNA, 19 bp, Artificial Sequence
  source: /note="Description of Artificial Sequence: Synthetic oligonucleotide"
tagaaggtgagggacctcc

SEQ ID NO: 323 - DNA, 19 bp, Artificial Sequence
  source: /note="Description of Artificial Sequence: Synthetic oligonucleotide"
ttcagcataagatcctccg

SEQ ID NO: 324 - DNA, 19 bp, Artificial Sequence
  source: /note="Description of Artificial Sequence: Synthetic oligonucleotide"
tgtatgatctggaagcggg

SEQ ID NO: 325 - DNA, 19 bp, Artificial Sequence
  source: /note="Description of Artificial Sequence: Synthetic oligonucleotide"
atatcttgttgaggtctcc

SEQ ID NO: 326 - DNA, 19 bp, Artificial Sequence
  source: /note="Description of Artificial Sequence: Synthetic oligonucleotide"
ataccaatgaccatgcctt

SEQ ID NO: 327 - DNA, 19 bp, Artificial Sequence
  source: /note="Description of Artificial Sequence: Synthetic oligonucleotide"
atgataccaatgaccatgc

SEQ ID NO: 328 - DNA, 19 bp, Artificial Sequence
  source: /note="Description of Artificial Sequence: Synthetic oligonucleotide"
atggtcattggtatcatga

SEQ ID NO: 329 - DNA, 19 bp, Artificial Sequence
  source: /note="Description of Artificial Sequence: Synthetic oligonucleotide"
gccctagtgggtatccctg

SEQ ID NO: 330 - DNA, 19 bp, Artificial Sequence
  source: /note="Description of Artificial Sequence: Synthetic oligonucleotide"
atgaggatggacattgttc

SEQ ID NO: 331 - DNA, 19 bp, Artificial Sequence
  source: /note="Description of Artificial Sequence: Synthetic oligonucleotide"
gagcatgcaggctacagtt

SEQ ID NO: 332 - DNA, 19 bp, Artificial Sequence
  source: /note="Description of Artificial Sequence: Synthetic oligonucleotide"
ttccagcacatgcactgtt

SEQ ID NO: 333 - DNA, 19 bp, Artificial Sequence
  source: /note="Description of Artificial Sequence: Synthetic oligonucleotide"
agcacatgcactgttgagt

SEQ ID NO: 334 - DNA, 19 bp, Artificial Sequence
  source: /note="Description of Artificial Sequence: Synthetic oligonucleotide"
ggccaggatggttcttaga

SEQ ID NO: 335 - DNA, 19 bp, Artificial Sequence
  source: /note="Description of Artificial Sequence: Synthetic oligonucleotide"
gcttcgtgctaaactggta

SEQ ID NO: 336 - DNA, 19 bp, Artificial Sequence
  source: /note="Description of Artificial Sequence: Synthetic oligonucleotide"
gggcgtgacttccacatga

SEQ ID NO: 337 - DNA, 19 bp, Artificial Sequence
  source: /note="Description of Artificial Sequence: Synthetic oligonucleotide"
caggcctagagaagtttca

SEQ ID NO: 338 - DNA, 19 bp, Artificial Sequence
  source: /note="Description of Artificial Sequence: Synthetic oligonucleotide"
cttggaacccattcctgaa

SEQ ID NO: 339 - DNA, 19 bp, Artificial Sequence
  source: /note="Description of Artificial Sequence: Synthetic oligonucleotide"
ggaacccattcctgaaatt

SEQ ID NO: 340 - DNA, 19 bp, Artificial Sequence
  source: /note="Description of Artificial Sequence: Synthetic oligonucleotide"
gaacccattcctgaaatta

SEQ ID NO: 341 - DNA, 19 bp, Artificial Sequence
  source: /note="Description of Artificial Sequence: Synthetic oligonucleotide"
aacccattcctgaaattat

SEQ ID NO: 342 - DNA, 19 bp, Artificial Sequence
  source: /note="Description of Artificial Sequence: Synthetic oligonucleotide"
acccattcctgaaattatt

SEQ ID NO: 343 - DNA, 19 bp, Artificial Sequence
  source: /note="Description of Artificial Sequence: Synthetic oligonucleotide"
cccattcctgaaattattt

SEQ ID NO: 344 - DNA, 19 bp, Artificial Sequence
  source: /note="Description of Artificial Sequence: Synthetic oligonucleotide"
ctgtggttctattatatta

SEQ ID NO: 345 - DNA, 19 bp, Artificial Sequence
  source: /note="Description of Artificial Sequence: Synthetic oligonucleotide"
aaatatgagagcatgctaa

SEQ ID NO: 346 - DNA, 19 bp, Artificial Sequence
  source: /note="Description of Artificial Sequence: Synthetic oligonucleotide"
tctaagaaccatcctggcc

SEQ ID NO: 347 - DNA, 19 bp, Artificial Sequence
  source: /note="Description of Artificial Sequence: Synthetic oligonucleotide"
taccagtttagcacgaagc

SEQ ID NO: 348 - DNA, 19 bp, Artificial Sequence
  source: /note="Description of Artificial Sequence: Synthetic oligonucleotide"
tcatgtggaagtcacgccc

SEQ ID NO: 349 - DNA, 19 bp, Artificial Sequence
  source: /note="Description of Artificial Sequence: Synthetic oligonucleotide"
tgaaacttctctaggcctg

SEQ ID NO: 350 - DNA, 19 bp, Artificial Sequence
  source: /note="Description of Artificial Sequence: Synthetic oligonucleotide"
ttcaggaatgggttccaag

SEQ ID NO: 351 - DNA, 19 bp, Artificial Sequence
  source: /note="Description of Artificial Sequence: Synthetic oligonucleotide"
aatttcaggaatgggttcc

SEQ ID NO: 352 - DNA, 19 bp, Artificial Sequence
  source: /note="Description of Artificial Sequence: Synthetic oligonucleotide"
taatttcaggaatgggttc

SEQ ID NO: 353 - DNA, 19 bp, Artificial Sequence
  source: /note="Description of Artificial Sequence: Synthetic oligonucleotide"
ataatttcaggaatgggtt

SEQ ID NO: 354 - DNA, 19 bp, Artificial Sequence
  source: /note="Description of Artificial Sequence: Synthetic oligonucleotide"
aataatttcaggaatgggt

SEQ ID NO: 355 - DNA, 19 bp, Artificial Sequence
  source: /note="Description of Artificial Sequence: Synthetic oligonucleotide"
aaataatttcaggaatggg

SEQ ID NO: 356 - DNA, 19 bp, Artificial Sequence
  source: /note="Description of Artificial Sequence: Synthetic oligonucleotide"
taatataatagaaccacag

SEQ ID NO: 357 - DNA, 19 bp, Artificial Sequence
  source: /note="Description of Artificial Sequence: Synthetic oligonucleotide"
ttagcatgctctcatattt

SEQ ID NO: 358 - DNA, 21 bp, Artificial Sequence
  source: /note="Description of Artificial Sequence: Synthetic oligonucleotide"
gcggccaggatggttcttaga

SEQ ID NO: 359 - DNA, 21 bp, Artificial Sequence
  source: /note="Description of Artificial Sequence: Synthetic oligonucleotide"
gagcttcgtgctaaactggta

SEQ ID NO: 360 - DNA, 21 bp, Artificial Sequence
  source: /note="Description of Artificial Sequence: Synthetic oligonucleotide"
acgggcgtgacttccacatga

SEQ ID NO: 361 - DNA, 21 bp, Artificial Sequence
  source: /note="Description of Artificial Sequence: Synthetic oligonucleotide"
tgcaggcctagagaagtttca

SEQ ID NO: 362 - DNA, 21 bp, Artificial Sequence
  source: /note="Description of Artificial Sequence: Synthetic oligonucleotide"
tccttggaacccattcctgaa

SEQ ID NO: 363 - DNA, 21 bp, Artificial Sequence
  source: /note="Description of Artificial Sequence: Synthetic oligonucleotide"
ttggaacccattcctgaaatt

SEQ ID NO: 364 - DNA, 21 bp, Artificial Sequence
  source: /note="Description of Artificial Sequence: Synthetic oligonucleotide"
tggaacccattcctgaaatta

SEQ ID NO: 365 - DNA, 21 bp, Artificial Sequence
  source: /note="Description of Artificial Sequence: Synthetic oligonucleotide"
ggaacccattcctgaaattat

SEQ ID NO: 366 - DNA, 21 bp, Artificial Sequence
  source: /note="Description of Artificial Sequence: Synthetic oligonucleotide"
gaacccattcctgaaattatt

SEQ ID NO: 367 - DNA, 21 bp, Artificial Sequence
  source: /note="Description of Artificial Sequence: Synthetic oligonucleotide"
aacccattcctgaaattattt

SEQ ID NO: 368 - DNA, 21 bp, Artificial Sequence
  source: /note="Description of Artificial Sequence: Synthetic oligonucleotide"
ccctgtggttctattatatta

SEQ ID NO: 369 - DNA, 21 bp, Artificial Sequence
  source: /note="Description of Artificial Sequence: Synthetic oligonucleotide"
ttaaatatgagagcatgctaa

SEQ ID NO: 370 - DNA, 21 bp, Artificial Sequence
  source: /note="Description of Artificial Sequence: Synthetic oligonucleotide"
tctaagaaccatcctggccgc

SEQ ID NO: 371 - DNA, 21 bp, Artificial Sequence
  source: /note="Description of Artificial Sequence: Synthetic oligonucleotide"
taccagtttagcacgaagctc

SEQ ID NO: 372 - DNA, 21 bp, Artificial Sequence
  source: /note="Description of Artificial Sequence: Synthetic oligonucleotide"
tcatgtggaagtcacgcccgt

SEQ ID NO: 373 - DNA, 21 bp, Artificial Sequence
  source: /note="Description of Artificial Sequence: Synthetic oligonucleotide"
tgaaacttctctaggcctgca

SEQ ID NO: 374 - DNA, 21 bp, Artificial Sequence
  source: /note="Description of Artificial Sequence: Synthetic oligonucleotide"
ttcaggaatgggttccaagga

SEQ ID NO: 375 - DNA, 21 bp, Artificial Sequence
  source: /note="Description of Artificial Sequence: Synthetic oligonucleotide"
aatttcaggaatgggttccaa

SEQ ID NO: 376 - DNA, 21 bp, Artificial Sequence
  source: /note="Description of Artificial Sequence: Synthetic oligonucleotide"
taatttcaggaatgggttcca

SEQ ID NO: 377 - DNA, 21 bp, Artificial Sequence
  source: /note="Description of Artificial Sequence: Synthetic oligonucleotide"
ataatttcaggaatgggttcc

SEQ ID NO: 378 - DNA, 21 bp, Artificial Sequence
  source: /note="Description of Artificial Sequence: Synthetic oligonucleotide"
aataatttcaggaatgggttc

SEQ ID NO: 379 - DNA, 21 bp, Artificial Sequence
  source: /note="Description of Artificial Sequence: Synthetic oligonucleotide"
aaataatttcaggaatgggtt

SEQ ID NO: 380 - DNA, 21 bp, Artificial Sequence
  source: /note="Description of Artificial Sequence: Synthetic oligonucleotide"
taatataatagaaccacaggg

SEQ ID NO: 381 - DNA, 21 bp, Artificial Sequence
  source: /note="Description of Artificial Sequence: Synthetic oligonucleotide"
ttagcatgctctcatatttaa

SEQ ID NO: 382 - DNA, 150 bp, Artificial Sequence
  source: /note="Description of Artificial Sequence: Synthetic polynucleotide"
aaaaaaaaaaaaaaaaaaaaaaaaaaaaaaaaaaaaaaaaaaaaaaaaaaaaaaaaaaaaaaaaaaaaaaaaaaaaaaaaaaaaaaaaaaaaaaaaaaaaaaaaaaaaaaaaaaaaaaaaaaaaaaaaaaaaaaaaaaaaaaaaaaaaaa

SEQ ID NO: 383 - protein, 4 aa, Artificial Sequence
  source: /note="Description of Artificial Sequence: Synthetic peptide"
RGDS

SEQ ID NO: 384 - protein, 5 aa, Artificial Sequence
  source: /note="Description of Artificial Sequence: Synthetic peptide"
NYAMS

SEQ ID NO: 385 - protein, 5 aa, Artificial Sequence
  source: /note="Description of Artificial Sequence: Synthetic peptide"
DYAMH

SEQ ID NO: 386 - protein, 5 aa, Artificial Sequence
  source: /note="Description of Artificial Sequence: Synthetic peptide"
NHGMS

SEQ ID NO: 387 - protein, 5 aa, Artificial Sequence
  source: /note="Description of Artificial Sequence: Synthetic peptide"
NFGIN

SEQ ID NO: 388 - protein, 5 aa, Artificial Sequence
  source: /note="Description of Artificial Sequence: Synthetic peptide"
SDAMT

SEQ ID NO: 389 - protein, 5 aa, Artificial Sequence
  source: /note="Description of Artificial Sequence: Synthetic peptide"
NYGIT

SEQ ID NO: 390 - protein, 5 aa, Artificial Sequence
  source: /note="Description of Artificial Sequence: Synthetic peptide"
NHGMS

SEQ ID NO: 391 - protein, 5 aa, Artificial Sequence
  source: /note="Description of Artificial Sequence: Synthetic peptide"
NHGMS

SEQ ID NO: 392 - protein, 5 aa, Artificial Sequence
  source: /note="Description of Artificial Sequence: Synthetic peptide"
NHGMS

SEQ ID NO: 393 - protein, 5 aa, Artificial Sequence
  source: /note="Description of Artificial Sequence: Synthetic peptide"
DYYMS

SEQ ID NO: 394 - protein, 5 aa, Artificial Sequence
  source: /note="Description of Artificial Sequence: Synthetic peptide"
NHGMS

SEQ ID NO: 395 - protein, 5 aa, Artificial Sequence
  source: /note="Description of Artificial Sequence: Synthetic peptide"
DYYMS

SEQ ID NO: 396 - protein, 5 aa, Artificial Sequence
  source: /note="Description of Artificial Sequence: Synthetic peptide"
NHGMS

SEQ ID NO: 397 - protein, 5 aa, Artificial Sequence
  source: /note="Description of Artificial Sequence: Synthetic peptide"
NHGMS

SEQ ID NO: 398 - protein, 5 aa, Artificial Sequence
  source: /note="Description of Artificial Sequence: Synthetic peptide"
NHGMS

SEQ ID NO: 399 - protein, 7 aa, Artificial Sequence
  source: /note="Description of Artificial Sequence: Synthetic peptide"
SSYYYWG

SEQ ID NO: 400 - protein, 7 aa, Artificial Sequence
  source: /note="Description of Artificial Sequence: Synthetic peptide"
TSGMCVS

SEQ ID NO: 401 - protein, 5 aa, Artificial Sequence
  source: /note="Description of Artificial Sequence: Synthetic peptide"
SYSMN

SEQ ID NO: 402 - protein, 5 aa, Artificial Sequence
  source: /note="Description of Artificial Sequence: Synthetic peptide"
DYYMS

SEQ ID NO: 403 - protein, 5 aa, Artificial Sequence
  source: /note="Description of Artificial Sequence: Synthetic peptide"
SHYIH

SEQ ID NO: 404 - protein, 7 aa, Artificial Sequence
  source: /note="Description of Artificial Sequence: Synthetic peptide"
SGGYYWS

SEQ ID NO: 405 - protein, 5 aa, Artificial Sequence
  source: /note="Description of Artificial Sequence: Synthetic peptide"
SYAIS

SEQ ID NO: 406 - protein, 7 aa, Artificial Sequence
  source: /note="Description of Artificial Sequence: Synthetic peptide"
SNSAAWN

SEQ ID NO: 407 - protein, 5 aa, Artificial Sequence
  source: /note="Description of Artificial Sequence: Synthetic peptide"
SYAMS

SEQ ID NO: 408 - protein, 5 aa, Artificial Sequence
  source: /note="Description of Artificial Sequence: Synthetic peptide"
RYPMS

SEQ ID NO: 409 - protein, 5 aa, Artificial Sequence
  source: /note="Description of Artificial Sequence: Synthetic peptide"
SYAMS

SEQ ID NO: 410 - protein, 5 aa, Artificial Sequence
  source: /note="Description of Artificial Sequence: Synthetic peptide"
SYAMS

SEQ ID NO: 411 - protein, 5 aa, Artificial Sequence
  source: /note="Description of Artificial Sequence: Synthetic peptide"
DYAMH

SEQ ID NO: 412 - protein, 5 aa, Artificial Sequence
  source: /note="Description of Artificial Sequence: Synthetic peptide"
DYAMH

SEQ ID NO: 413 - protein, 5 aa, Artificial Sequence
  source: /note="Description of Artificial Sequence: Synthetic peptide"
SYAMS

SEQ ID NO: 414 - protein, 5 aa, Artificial Sequence
  source: /note="Description of Artificial Sequence: Synthetic peptide"
SYAMS

SEQ ID NO: 415 - protein, 5 aa, Artificial Sequence
  source: /note="Description of Artificial Sequence: Synthetic peptide"
SYAMS

SEQ ID NO: 416 - protein, 5 aa, Artificial Sequence
  source: /note="Description of Artificial Sequence: Synthetic peptide"
SYAMS

SEQ ID NO: 417 - protein, 5 aa, Artificial Sequence
  source: /note="Description of Artificial Sequence: Synthetic peptide"
SYAMS

SEQ ID NO: 418 - protein, 5 aa, Artificial Sequence
  source: /note="Description of Artificial Sequence: Synthetic peptide"
SYAMS

SEQ ID NO: 419 - protein, 5 aa, Artificial Sequence
  source: /note="Description of Artificial Sequence: Synthetic peptide"
SYAMS

SEQ ID NO: 420 - protein, 5 aa, Artificial Sequence
  source: /note="Description of Artificial Sequence: Synthetic peptide"
NFGMN

SEQ ID NO: 421 - protein, 5 aa, Artificial Sequence
  source: /note="Description of Artificial Sequence: Synthetic peptide"
DYSIN

SEQ ID NO: 422 - protein, 5 aa, Artificial Sequence
  source: /note="Description of Artificial Sequence: Synthetic peptide"
HYSMN

SEQ ID NO: 423 - protein, 5 aa, Artificial Sequence
  source: /note="Description of Artificial Sequence: Synthetic peptide"
HYSMN

SEQ ID NO: 424 - protein, 17 aa, Artificial Sequence
  source: /note="Description of Artificial Sequence: Synthetic peptide"
GISRSGENTYYADSVKG

SEQ ID NO: 425 - protein, 17 aa, Artificial Sequence
  source: /note="Description of Artificial Sequence: Synthetic peptide"
GISWNSGSIGYADSVKG

SEQ ID NO: 426 - protein, 16 aa, Artificial Sequence
  source: /note="Description of Artificial Sequence: Synthetic peptide"
GIVYSGSTYYAASVKG

SEQ ID NO: 427 - protein, 17 aa, Artificial Sequence
  source: /note="Description of Artificial Sequence: Synthetic peptide"
WINPKNNNTNYAQKFQG

SEQ ID NO: 428 - protein, 17 aa, Artificial Sequence
  source: /note="Description of Artificial Sequence: Synthetic peptide"
VISGSGGTTYYADSVKG

SEQ ID NO: 429 - protein, 17 aa, Artificial Sequence
  source: /note="Description of Artificial Sequence: Synthetic peptide"
WISAYNGNTNYAQKFQG

SEQ ID NO: 430 - protein, 16 aa, Artificial Sequence
  source: /note="Description of Artificial Sequence: Synthetic peptide"
GIVYSGSTYYAASVKG

SEQ ID NO: 431 - protein, 16 aa, Artificial Sequence
  source: /note="Description of Artificial Sequence: Synthetic peptide"
GIVYSGSTYYAASVKG

SEQ ID NO: 432 - protein, 16 aa, Artificial Sequence
  source: /note="Description of Artificial Sequence: Synthetic peptide"
GIVYSGSTYYAASVKG

SEQ ID NO: 433 - protein, 17 aa, Artificial Sequence
  source: /note="Description of Artificial Sequence: Synthetic peptide"
YISSSGSTIYYADSVKG

SEQ ID NO: 434 - protein, 16 aa, Artificial Sequence
  source: /note="Description of Artificial Sequence: Synthetic peptide"
GIVYSGSTYYAASVKG

SEQ ID NO: 435 - protein, 17 aa, Artificial Sequence
  source: /note="Description of Artificial Sequence: Synthetic peptide"
YISSSGNTIYYADSVKG

SEQ ID NO: 436 - protein, 16 aa, Artificial Sequence
  source: /note="Description of Artificial Sequence: Synthetic peptide"
GIVYSGSTYYAASVKG

SEQ ID NO: 437 - protein, 16 aa, Artificial Sequence
  source: /note="Description of Artificial Sequence: Synthetic peptide"
GIVYSGSTYYAASVKG

SEQ ID NO: 438 - protein, 16 aa, Artificial Sequence
  source: /note="Description of Artificial Sequence: Synthetic peptide"
GIVYSGSTYYAASVKG

SEQ ID NO: 439 - protein, 16 aa, Artificial Sequence
  source: /note="Description of Artificial Sequence: Synthetic peptide"
SIYYSGSAYYNPSLKS

SEQ ID NO: 440 - protein, 16 aa, Artificial Sequence
  source: /note="Description of Artificial Sequence: Synthetic peptide"
RIDWDEDKFYSTSLKT

SEQ ID NO: 441 - protein, 17 aa, Artificial Sequence
  source: /note="Description of Artificial Sequence: Synthetic peptide"
SISSSSSYIYYADSVKG

SEQ ID NO: 442 - protein, 17 aa, Artificial Sequence
  source: /note="Description of Artificial Sequence: Synthetic peptide"
YISSSGSTIYYADSVKG

SEQ ID NO: 443 - protein, 17 aa, Artificial Sequence
  source: /note="Description of Artificial Sequence: Synthetic peptide"
MINPSGGVTAYSQTLQG

SEQ ID NO: 444 - protein, 16 aa, Artificial Sequence
  source: /note="Description of Artificial Sequence: Synthetic peptide"
YIYYSGSTYYNPSLKS

SEQ ID NO: 445 - protein, 17 aa, Artificial Sequence
  source: /note="Description of Artificial Sequence: Synthetic peptide"
GIIPIFGTANYAQKFQG

SEQ ID NO: 446 - protein, 18 aa, Artificial Sequence
  source: /note="Description of Artificial Sequence: Synthetic peptide"
RTYYRSKWYSFYAISLKS

SEQ ID NO: 447 - protein, 17 aa, Artificial Sequence
  source: /note="Description of Artificial Sequence: Synthetic peptide"
AISGSGGSTYYADSVKG

SEQ ID NO: 448 - protein, 17 aa, Artificial Sequence
  source: /note="Description of Artificial Sequence: Synthetic peptide"
GISDSGVSTYYADSAKG

SEQ ID NO: 449 - protein, 17 aa, Artificial Sequence
  source: /note="Description of Artificial Sequence: Synthetic peptide"
AISGSGGSTYYADSVKG

SEQ ID NO: 450 - protein, 17 aa, Artificial Sequence
  source: /note="Description of Artificial Sequence: Synthetic peptide"
AISGSGGSTYYADSVKG

SEQ ID NO: 451 - protein, 17 aa, Artificial Sequence
  source: /note="Description of Artificial Sequence: Synthetic peptide"
GISWNSGSIGYADSVKG

SEQ ID NO: 452 - protein, 17 aa, Artificial Sequence
  source: /note="Description of Artificial Sequence: Synthetic peptide"
SINWKGNSLAYGDSVKG

SEQ ID NO: 453 - protein, 17 aa, Artificial Sequence
  source: /note="Description of Artificial Sequence: Synthetic peptide"
AISGSGGSTYYADSVKG

SEQ ID NO: 454 - protein, 17 aa, Artificial Sequence
  source: /note="Description of Artificial Sequence: Synthetic peptide"
AISGSGGSTYYADSVKG

SEQ ID NO: 455 - protein, 17 aa, Artificial Sequence
  source: /note="Description of Artificial Sequence: Synthetic peptide"
AISGSGGSTYYADSVKG

SEQ ID NO: 456 - protein, 17 aa, Artificial Sequence
  source: /note="Description of Artificial Sequence: Synthetic peptide"
AISGSGGSTYYADSVKG

SEQ ID NO: 457 - protein, 17 aa, Artificial Sequence
  source: /note="Description of Artificial Sequence: Synthetic peptide"
AISGSGGSTYYADSVKG

SEQ ID NO: 458 - protein, 17 aa, Artificial Sequence
  source: /note="Description of Artificial Sequence: Synthetic peptide"
AISGSGGSTYYADSVKG

SEQ ID NO: 459 - protein, 17 aa, Artificial Sequence
  source: /note="Description of Artificial Sequence: Synthetic peptide"
AISGSGGSTYYADSVKG

SEQ ID NO: 460 - protein, 17 aa, Artificial Sequence
  source: /note="Description of Artificial Sequence: Synthetic peptide"
WINTYTGESYFADDFKG

SEQ ID NO: 461 - protein, 17 aa, Artificial Sequence
  source: /note="Description of Artificial Sequence: Synthetic peptide"
WINTETREPAYAYDFRG

SEQ ID NO: 462 - protein, 17 aa, Artificial Sequence
  source: /note="Description of Artificial Sequence: Synthetic peptide"
RINTESGVPIYADDFKG

SEQ ID NO: 463 - protein, 17 aa, Artificial Sequence
  source: /note="Description of Artificial Sequence: Synthetic peptide"
RINTETGEPLYADDFKG

SEQ ID NO: 464 - protein, 11 aa, Artificial Sequence
  source: /note="Description of Artificial Sequence: Synthetic peptide"
SPAHYYGGMDV

SEQ ID NO: 465 - protein, 6 aa, Artificial Sequence
  source: /note="Description of Artificial Sequence: Synthetic peptide"
HSFLAY

SEQ ID NO: 466 - protein, 7 aa, Artificial Sequence
  source: /note="Description of Artificial Sequence: Synthetic peptide"
HGGESDV

SEQ ID NO: 467 - protein, 11 aa, Artificial Sequence
  source: /note="Description of Artificial Sequence: Synthetic peptide"
GPYYYQSYMDV

SEQ ID NO: 468 - protein, 14 aa, Artificial Sequence
  source: /note="Description of Artificial Sequence: Synthetic peptide"
LDSSGYYYARGPRY

SEQ ID NO: 469 - protein, 9 aa, Artificial Sequence
  source: /note="Description of Artificial Sequence: Synthetic peptide"
GPYYYYMDV

SEQ ID NO: 470 - protein, 7 aa, Artificial Sequence
  source: /note="Description of Artificial Sequence: Synthetic peptide"
HGGESDV

SEQ ID NO: 471 - protein, 7 aa, Artificial Sequence
  source: /note="Description of Artificial Sequence: Synthetic peptide"
HGGESDV

SEQ ID NO: 472 - protein, 7 aa, Artificial Sequence
  source: /note="Description of Artificial Sequence: Synthetic peptide"
HGGESDV

SEQ ID NO: 473 - protein, 8 aa, Artificial Sequence
  source: /note="Description of Artificial Sequence: Synthetic peptide"
ESGDGMDV

SEQ ID NO: 474 - protein, 7 aa, Artificial Sequence
  source: /note="Description of Artificial Sequence: Synthetic peptide"
HGGESDV

SEQ ID NO: 475 - protein, 8 aa, Artificial Sequence
  source: /note="Description of Artificial Sequence: Synthetic peptide"
STMVREDY

SEQ ID NO: 476 - protein, 7 aa, Artificial Sequence
  source: /note="Description of Artificial Sequence: Synthetic peptide"
HGGESDV

SEQ ID NO: 477 - protein, 7 aa, Artificial Sequence
  source: /note="Description of Artificial Sequence: Synthetic peptide"
HGGESDV

SEQ ID NO: 478 - protein, 7 aa, Artificial Sequence
  source: /note="Description of Artificial Sequence: Synthetic peptide"
HGGESDV

SEQ ID NO: 479 - protein, 11 aa, Artificial Sequence
  source: /note="Description of Artificial Sequence: Synthetic peptide"
HWQEWPDAFDI

SEQ ID NO: 480 - protein, 13 aa, Artificial Sequence
  source: /note="Description of Artificial Sequence: Synthetic peptide"
SGAGGTSATAFDI

SEQ ID NO: 481 - protein, 10 aa, Artificial Sequence
  source: /note="Description of Artificial Sequence: Synthetic peptide"
TIAAVYAFDI

SEQ ID NO: 482 - protein, 8 aa, Artificial Sequence
  source: /note="Description of Artificial Sequence: Synthetic peptide"
DLRGAFDI

SEQ ID NO: 483 - protein, 11 aa, Artificial Sequence
  source: /note="Description of Artificial Sequence: Synthetic peptide"
EGSGSGWYFDF

SEQ ID NO: 484 - protein, 13 aa, Artificial Sequence
  source: /note="Description of Artificial Sequence: Synthetic peptide"
AGIAARLRGAFDI

SEQ ID NO: 485 - protein, 20 aa, Artificial Sequence
  source: /note="Description of Artificial Sequence: Synthetic peptide"
RGGYQLLRWDVGLLRSAFDI

SEQ ID NO: 486 - protein, 13 aa, Artificial Sequence
  source: /note="Description of Artificial Sequence: Synthetic peptide"
SSPEGLFLYWFDP

SEQ ID NO: 487 - protein, 9 aa, Artificial Sequence
  source: /note="Description of Artificial Sequence: Synthetic peptide"
VEGSGSLDY

SEQ ID NO: 488 - protein, 9 aa, Artificial Sequence
  source: /note="Description of Artificial Sequence: Synthetic peptide"
RAGSEASDI

SEQ ID NO: 489 - protein, 15 aa, Artificial Sequence
  source: /note="Description of Artificial Sequence: Synthetic peptide"
ATYKRELRYYYGMDV

SEQ ID NO: 490 - protein, 15 aa, Artificial Sequence
  source: /note="Description of Artificial Sequence: Synthetic peptide"
ATYKRELRYYYGMDV

SEQ ID NO: 491 - protein, 8 aa, Artificial Sequence
  source: /note="Description of Artificial Sequence: Synthetic peptide"
VGKAVPDV

SEQ ID NO: 492 - protein, 13 aa, Artificial Sequence
  source: /note="Description of Artificial Sequence: Synthetic peptide"
HQGVAYYNYAMDV

SEQ ID NO: 493 - protein, 8 aa, Artificial Sequence
  source: /note="Description of Artificial Sequence: Synthetic peptide"
VVRDGMDV

SEQ ID NO: 494 - protein, 9 aa, Artificial Sequence
  source: /note="Description of Artificial Sequence: Synthetic peptide"
IPQTGTFDY

SEQ ID NO: 495 - protein, 15 aa, Artificial Sequence
  source: /note="Description of Artificial Sequence: Synthetic peptide"
ANYKRELRYYYGMDV

SEQ ID NO: 496 - protein, 11 aa, Artificial Sequence
  source: /note="Description of Artificial Sequence: Synthetic peptide"
ALVGATGAFDI

SEQ ID NO: 497 - protein, 8 aa, Artificial Sequence
  source: /note="Description of Artificial Sequence: Synthetic peptide"
WFGEGFDP

SEQ ID NO: 498 - protein, 17 aa, Artificial Sequence
  source: /note="Description of Artificial Sequence: Synthetic peptide"
VGYDSSGYYRDYYGMDV

SEQ ID NO: 499 - protein, 13 aa, Artificial Sequence
  source: /note="Description of Artificial Sequence: Synthetic peptide"
MGWSSGYLGAFDI

SEQ ID NO: 500 - protein, 13 aa, Artificial Sequence
  source: /note="Description of Artificial Sequence: Synthetic peptide"
GEIYYGYDGGFAY

SEQ ID NO: 501 - protein, 8 aa, Artificial Sequence
  source: /note="Description of Artificial Sequence: Synthetic peptide"
DYSYAMDY

SEQ ID NO: 502 - protein, 8 aa, Artificial Sequence
  source: /note="Description of Artificial Sequence: Synthetic peptide"
DYLYSLDF

SEQ ID NO: 503 - protein, 8 aa, Artificial Sequence
  source: /note="Description of Artificial Sequence: Synthetic peptide"
DYLYSCDY

SEQ ID NO: 504 - protein, 12 aa, Artificial Sequence
  source: /note="Description of Artificial Sequence: Synthetic peptide"
RASQSISSSFLA

SEQ ID NO: 505 - protein, 16 aa, Artificial Sequence
  source: /note="Description of Artificial Sequence: Synthetic peptide"
RSSQSLLHSNGYNYLD

SEQ ID NO: 506 - protein, 16 aa, Artificial Sequence
  source: /note="Description of Artificial Sequence: Synthetic peptide"
KSSQSLLRNDGKTPLY

SEQ ID NO: 507 - protein, 16 aa, Artificial Sequence
  source: /note="Description of Artificial Sequence: Synthetic peptide"
RSSQSLLHSNGYNYLN

SEQ ID NO: 508 - protein, 11 aa, Artificial Sequence
  source: /note="Description of Artificial Sequence: Synthetic peptide"
RASQSISSYLN

SEQ ID NO: 509 - protein, 16 aa, Artificial Sequence
  source: /note="Description of Artificial Sequence: Synthetic peptide"
RSSQSLLYSNGYNYVD

SEQ ID NO: 510 - protein, 11 aa, Artificial Sequence
  source: /note="Description of Artificial Sequence: Synthetic peptide"
RASQSVSSNLA

SEQ ID NO: 511 - protein, 11 aa, Artificial Sequence
  source: /note="Description of Artificial Sequence: Synthetic peptide"
RASQSVSSKLA

SEQ ID NO: 512 - protein, 12 aa, Artificial Sequence
  source: /note="Description of Artificial Sequence: Synthetic peptide"
RASQSVGSTNLA

SEQ ID NO: 513 - protein, 11 aa, Artificial Sequence
  source: /note="Description of Artificial Sequence: Synthetic peptide"
RASQSISSYLN

SEQ ID NO: 514 - protein, 11 aa, Artificial Sequence
  source: /note="Description of Artificial Sequence: Synthetic peptide"
RASQSISSYLN

SEQ ID NO: 515 - protein, 16 aa, Artificial Sequence
  source: /note="Description of Artificial Sequence: Synthetic peptide"
KSSESLVHNSGKTYLN

SEQ ID NO: 516 - protein, 11 aa, Artificial Sequence
  source: /note="Description of Artificial Sequence: Synthetic peptide"
QASEDINKFLN

SEQ ID NO: 517 - protein, 11 aa, Artificial Sequence
  source: /note="Description of Artificial Sequence: Synthetic peptide"
RASQSVGSNLA

SEQ ID NO: 518 - protein, 12 aa, Artificial Sequence
  source: /note="Description of Artificial Sequence: Synthetic peptide"
RASQSIGSSSLA

SEQ ID NO: 519 - protein, 11 aa, Artificial Sequence
  source: /note="Description of Artificial Sequence: Synthetic peptide"
KASQDIDDAMN

SEQ ID NO: 520 - protein, 11 aa, Artificial Sequence
  source: /note="Description of Artificial Sequence: Synthetic peptide"
RASQDIYNNLA

SEQ ID NO: 521 - protein, 16 aa, Artificial Sequence
  source: /note="Description of Artificial Sequence: Synthetic peptide"
RSSQSLLHSNGYNYLD

SEQ ID NO: 522 - protein, 11 aa, Artificial Sequence
  source: /note="Description of Artificial Sequence: Synthetic peptide"
GGNNIGTKSVH

SEQ ID NO: 523 - protein, 11 aa, Artificial Sequence
  source: /note="Description of Artificial Sequence: Synthetic peptide"
SGDGLSKKYVS

SEQ ID NO: 524 - protein, 11 aa, Artificial Sequence
  source: /note="Description of Artificial Sequence: Synthetic peptide"
RASQGIRNWLA

SEQ ID NO: 525 - protein, 11 aa, Artificial Sequence
  source: /note="Description of Artificial Sequence: Synthetic peptide"
GGNNIGSKSVH

SEQ ID NO: 526 - protein, 11 aa, Artificial Sequence
  source: /note="Description of Artificial Sequence: Synthetic peptide"
QGDSLGNYYAT

SEQ ID NO: 527 - protein, 12 aa, Artificial Sequence
  source: /note="Description of Artificial Sequence: Synthetic peptide"
RASQSVSSAYLA

SEQ ID NO: 528 - protein, 11 aa, Artificial Sequence
  source: /note="Description of Artificial Sequence: Synthetic peptide"
RASQSVSNSLA

SEQ ID NO: 529 - protein, 12 aa, Artificial Sequence
  source: /note="Description of Artificial Sequence: Synthetic peptide"
RASQSVSSSFLA

SEQ ID NO: 530 - protein, 12 aa, Artificial Sequence
  source: /note="Description of Artificial Sequence: Synthetic peptide"
RASQSVSTTFLA

SEQ ID NO: 531 - protein, 11 aa, Artificial Sequence
  source: /note="Description of Artificial Sequence: Synthetic peptide"
RASQSISSYLN

SEQ ID NO: 532 - protein, 12 aa, Artificial Sequence
  source: /note="Description of Artificial Sequence: Synthetic peptide"
RATQSIGSSFLA

SEQ ID NO: 533 - protein, 12 aa, Artificial Sequence
  source: /note="Description of Artificial Sequence: Synthetic peptide"
RASQSVSSSYLA

SEQ ID NO: 534 - protein, 12 aa, Artificial Sequence
  source: /note="Description of Artificial Sequence: Synthetic peptide"
RASQSVSSSYLA

SEQ ID NO: 535 - protein, 12 aa, Artificial Sequence
  source: /note="Description of Artificial Sequence: Synthetic peptide"
RASQRVASNYLA

SEQ ID NO: 536 - protein, 12 aa, Artificial Sequence
  source: /note="Description of Artificial Sequence: Synthetic peptide"
RASQSLSSNFLA

SEQ ID NO: 537 - protein, 16 aa, Artificial Sequence
  source: /note="Description of Artificial Sequence: Synthetic peptide"
RSSQSLLHSNGYNYLD

SEQ ID NO: 538 - protein, 12 aa, Artificial Sequence
  source: /note="Description of Artificial Sequence: Synthetic peptide"
RASQSVSSSYLA

SEQ ID NO: 539 - protein, 12 aa, Artificial Sequence
  source: /note="Description of Artificial Sequence: Synthetic peptide"
RASQSVASSFLA

SEQ ID NO: 540 - protein, 11 aa, Artificial Sequence
  source: /note="Description of Artificial Sequence: Synthetic peptide"
RASQDVNTAVS

SEQ ID NO: 541 - protein, 15 aa, Artificial Sequence
  source: /note="Description of Artificial Sequence: Synthetic peptide"
RASESVSVIGAHLIH

SEQ ID NO: 542 - protein, 15 aa, Artificial Sequence
  source: /note="Description of Artificial Sequence: Synthetic peptide"
RASESVTILGSHLIY

SEQ ID NO: 543 - protein, 15 aa, Artificial Sequence
  source: /note="Description of Artificial Sequence: Synthetic peptide"
RASESVTILGSHLIY

SEQ ID NO: 544 - protein, 7 aa, Artificial Sequence
  source: /note="Description of Artificial Sequence: Synthetic peptide"
GASRRAT

SEQ ID NO: 545 - protein, 7 aa, Artificial Sequence
  source: /note="Description of Artificial Sequence: Synthetic peptide"
LGSNRAS

SEQ ID NO: 546 - protein, 7 aa, Artificial Sequence
  source: /note="Description of Artificial Sequence: Synthetic peptide"
EVSNRFS

SEQ ID NO: 547 - protein, 7 aa, Artificial Sequence
  source: /note="Description of Artificial Sequence: Synthetic peptide"
LGSKRAS

SEQ ID NO: 548 - protein, 7 aa, Artificial Sequence
  source: /note="Description of Artificial Sequence: Synthetic peptide"
GASTLAS

SEQ ID NO: 549 - protein, 7 aa, Artificial Sequence
  source: /note="Description of Artificial Sequence: Synthetic peptide"
LGSNRAS

SEQ ID NO: 550 - protein, 7 aa, Artificial Sequence
  source: /note="Description of Artificial Sequence: Synthetic peptide"
GASTRAS

SEQ ID NO: 551 - protein, 7 aa, Artificial Sequence
  source: /note="Description of Artificial Sequence: Synthetic peptide"
GASIRAT

SEQ ID NO: 552 - protein, 7 aa, Artificial Sequence
  source: /note="Description of Artificial Sequence: Synthetic peptide"
DASNRAT

SEQ ID NO: 553 - protein, 7 aa, Artificial Sequence
  source: /note="Description of Artificial Sequence: Synthetic peptide"
AASSLQS

SEQ ID NO: 554 - protein, 7 aa, Artificial Sequence
  source: /note="Description of Artificial Sequence: Synthetic peptide"
AASSLQS

SEQ ID NO: 555 - protein, 7 aa, Artificial Sequence
  source: /note="Description of Artificial Sequence: Synthetic peptide"
EVSNRDS

SEQ ID NO: 556 - protein, 7 aa, Artificial Sequence
  source: /note="Description of Artificial Sequence: Synthetic peptide"
DASTLQT

SEQ ID NO: 557 - protein, 7 aa, Artificial Sequence
  source: /note="Description of Artificial Sequence: Synthetic peptide"
GASTRAT

SEQ ID NO: 558 - protein, 7 aa, Artificial Sequence
  source: /note="Description of Artificial Sequence: Synthetic peptide"
GASSRAS

SEQ ID NO: 559 - protein, 7 aa, Artificial Sequence
  source: /note="Description of Artificial Sequence: Synthetic peptide"
SATSPVP

SEQ ID NO: 560 - protein, 7 aa, Artificial Sequence
  source: /note="Description of Artificial Sequence: Synthetic peptide"
AANKSQS

SEQ ID NO: 561 - protein, 7 aa, Artificial Sequence
  source: /note="Description of Artificial Sequence: Synthetic peptide"
LGSNRAS

SEQ ID NO: 562 - protein, 7 aa, Artificial Sequence
  source: /note="Description of Artificial Sequence: Synthetic peptide"
DDSVRPS

SEQ ID NO: 563 - protein, 7 aa, Artificial Sequence
  source: /note="Description of Artificial Sequence: Synthetic peptide"
RDKERPS

SEQ ID NO: 564 - protein, 7 aa, Artificial Sequence
  source: /note="Description of Artificial Sequence: Synthetic peptide"
AASNLQS

SEQ ID NO: 565 - protein, 7 aa, Artificial Sequence
  source: /note="Description of Artificial Sequence: Synthetic peptide"
GKNNRPS

SEQ ID NO: 566 - protein, 7 aa, Artificial Sequence
  source: /note="Description of Artificial Sequence: Synthetic peptide"
GTNNRPS

SEQ ID NO: 567 - protein, 7 aa, Artificial Sequence
  source: /note="Description of Artificial Sequence: Synthetic peptide"
GASTRAT

SEQ ID NO: 568 - protein, 7 aa, Artificial Sequence
  source: /note="Description of Artificial Sequence: Synthetic peptide"
DASSRAT

SEQ ID NO: 569 - protein, 7 aa, Artificial Sequence
  source: /note="Description of Artificial Sequence: Synthetic peptide"
GASSRAT

SEQ ID NO: 570 - protein, 7 aa, Artificial Sequence
  source: /note="Description of Artificial Sequence: Synthetic peptide"
GSSNRAT

SEQ ID NO: 571 - protein, 7 aa, Artificial Sequence
  source: /note="Description of Artificial Sequence: Synthetic peptide"
AASSLQS

SEQ ID NO: 572 - protein, 7 aa, Artificial Sequence
  source: /note="Description of Artificial Sequence: Synthetic peptide"
GASQRAT

SEQ ID NO: 573 - protein, 7 aa, Artificial Sequence
  source: /note="Description of Artificial Sequence: Synthetic peptide"
GASSRAT

SEQ ID NO: 574 - protein, 7 aa, Artificial Sequence
  source: /note="Description of Artificial Sequence: Synthetic peptide"
GASSRAT

SEQ ID NO: 575 - protein, 7 aa, Artificial Sequence
  source: /note="Description of Artificial Sequence: Synthetic peptide"
GASSRAT

SEQ ID NO: 576 - protein, 7 aa, Artificial Sequence
  source: /note="Description of Artificial Sequence: Synthetic peptide"
GASNWAT

SEQ ID NO: 577 - protein, 7 aa, Artificial Sequence
  source: /note="Description of Artificial Sequence: Synthetic peptide"
LGSNRAS

SEQ ID NO: 578 - protein, 7 aa, Artificial Sequence
  source: /note="Description of Artificial Sequence: Synthetic peptide"
GTSSRAT

SEQ ID NO: 579 - protein, 7 aa, Artificial Sequence
  source: /note="Description of Artificial Sequence: Synthetic peptide"
GASGRAT

SEQ ID NO: 580 - protein, 7 aa, Artificial Sequence
  source: /note="Description of Artificial Sequence: Synthetic peptide"
SASYRYT

SEQ ID NO: 581 - protein, 7 aa, Artificial Sequence
  source: /note="Description of Artificial Sequence: Synthetic peptide"
LASNLET

SEQ ID NO: 582 - protein, 7 aa, Artificial Sequence
  source: /note="Description of Artificial Sequence: Synthetic peptide"
LASNVQT

SEQ ID NO: 583 - protein, 7 aa, Artificial Sequence
  source: /note="Description of Artificial Sequence: Synthetic peptide"
LASNVQT

SEQ ID NO: 584 - protein, 10 aa, Artificial Sequence
  source: /note="Description of Artificial Sequence: Synthetic peptide"
QQYHSSPSWT

SEQ ID NO: 585 - protein, 9 aa, Artificial Sequence
  source: /note="Description of Artificial Sequence: Synthetic peptide"
MQALQTPYT

SEQ ID NO: 586 - protein, 8 aa, Artificial Sequence
  source: /note="Description of Artificial Sequence: Synthetic peptide"
MQNIQFPS

SEQ ID NO: 587 - protein, 9 aa, Artificial Sequence
  source: /note="Description of Artificial Sequence: Synthetic peptide"
MQALQTPYT

SEQ ID NO: 588 - protein, 8 aa, Artificial Sequence
  source: /note="Description of Artificial Sequence: Synthetic peptide"
QQSYKRAS

SEQ ID NO: 589 - protein, 9 aa, Artificial Sequence
  source: /note="Description of Artificial Sequence: Synthetic peptide"
MQGRQFPYS

SEQ ID NO: 590 - protein, 8 aa, Artificial Sequence
  source: /note="Description of Artificial Sequence: Synthetic peptide"
QQYGSSLT

SEQ ID NO: 591 - protein, 9 aa, Artificial Sequence
  source: /note="Description of Artificial Sequence: Synthetic peptide"
QQYGSSSWT

SEQ ID NO: 592 - protein, 10 aa, Artificial Sequence
  source: /note="Description of Artificial Sequence: Synthetic peptide"
QQYGSSPPWT

SEQ ID NO: 593 - protein, 7 aa, Artificial Sequence
  source: /note="Description of Artificial Sequence: Synthetic peptide"
QQSYTLA

SEQ ID NO: 594 - protein, 9 aa, Artificial Sequence
  source: /note="Description of Artificial Sequence: Synthetic peptide"
QQSYSTPYT

SEQ ID NO: 595 - protein, 9 aa, Artificial Sequence
  source: /note="Description of Artificial Sequence: Synthetic peptide"
MQGTHWPGT

SEQ ID NO: 596 - protein, 9 aa, Artificial Sequence
  source: /note="Description of Artificial Sequence: Synthetic peptide"
QQYESLPLT

SEQ ID NO: 597 - protein, 10 aa, Artificial Sequence
  source: /note="Description of Artificial Sequence: Synthetic peptide"
QQYNDWLPVT

SEQ ID NO: 598 - protein, 10 aa, Artificial Sequence
  source: /note="Description of Artificial Sequence: Synthetic peptide"
QQYAGSPPFT

SEQ ID NO: 599 - protein, 9 aa, Artificial Sequence
  source: /note="Description of Artificial Sequence: Synthetic peptide"
LQHDNFPLT

SEQ ID NO: 600 - protein, 9 aa, Artificial Sequence
  source: /note="Description of Artificial Sequence: Synthetic peptide"
QHYYRFPYS

SEQ ID NO: 601 - protein, 9 aa, Artificial Sequence
  source: /note="Description of Artificial Sequence: Synthetic peptide"
MQALQTPYT

SEQ ID NO: 602 - protein, 11 aa, Artificial Sequence
  source: /note="Description of Artificial Sequence: Synthetic peptide"
QVWDSDSEHVV

SEQ ID NO: 603 - protein, 9 aa, Artificial Sequence
  source: /note="Description of Artificial Sequence: Synthetic peptide"
QAWDDTTVV

SEQ ID NO: 604 - protein, 9 aa, Artificial Sequence
  source: /note="Description of Artificial Sequence: Synthetic peptide"
QKYNSAPFT

SEQ ID NO: 605 - protein, 12 aa, Artificial Sequence
  source: /note="Description of Artificial Sequence: Synthetic peptide"
SSRDSSGDHLRV

SEQ ID NO: 606 - protein, 11 aa, Artificial Sequence
  source: /note="Description of Artificial Sequence: Synthetic peptide"
NSRDSSGHHLL

SEQ ID NO: 607 - protein, 14 aa, Artificial Sequence
  source: /note="Description of Artificial Sequence: Synthetic peptide"
QHYGSSFNGSSLFT

SEQ ID NO: 608 - protein, 10 aa, Artificial Sequence
  source: /note="Description of Artificial Sequence: Synthetic peptide"
QQFGTSSGLT

SEQ ID NO: 609 - protein, 10 aa, Artificial Sequence
  source: /note="Description of Artificial Sequence: Synthetic peptide"
QQYHSSPSWT

SEQ ID NO: 610 - protein, 10 aa, Artificial Sequence
  source: /note="Description of Artificial Sequence: Synthetic peptide"
QQYHSSPSWT

SEQ ID NO: 611 - protein, 9 aa, Artificial Sequence
  source: /note="Description of Artificial Sequence: Synthetic peptide"
QQSYSTPYS

SEQ ID NO: 612 - protein, 10 aa, Artificial Sequence
  source: /note="Description of Artificial Sequence: Synthetic peptide"
QHYESSPSWT

SEQ ID NO: 613 - protein, 10 aa, Artificial Sequence
  source: /note="Description of Artificial Sequence: Synthetic peptide"
QQYGSPPRFT

SEQ ID NO: 614 - protein, 10 aa, Artificial Sequence
  source: /note="Description of Artificial Sequence: Synthetic peptide"
QHYGSSPSWT

SEQ ID NO: 615 - protein, 10 aa, Artificial Sequence
  source: /note="Description of Artificial Sequence: Synthetic peptide"
QHYDSSPSWT

SEQ ID NO: 616 - protein, 10 aa, Artificial Sequence
  source: /note="Description of Artificial Sequence: Synthetic peptide"
QYYGTSPMYT

SEQ ID NO: 617 - protein, 9 aa, Artificial Sequence
  source: /note="Description of Artificial Sequence: Synthetic peptide"
MQALQTPLT

SEQ ID NO: 618 - protein, 11 aa, Artificial Sequence
  source: /note="Description of Artificial Sequence: Synthetic peptide"
QHYGNSPPKFT

SEQ ID NO: 619 - protein, 10 aa, Artificial Sequence
  source: /note="Description of Artificial Sequence: Synthetic peptide"
QHYGGSPRLT

SEQ ID NO: 620 - protein, 9 aa, Artificial Sequence
  source: /note="Description of Artificial Sequence: Synthetic peptide"
QQHYSTPWT

SEQ ID NO: 621 - protein, 9 aa, Artificial Sequence
  source: /note="Description of Artificial Sequence: Synthetic peptide"
LQSRIFPRT

SEQ ID NO: 622 - protein, 9 aa, Artificial Sequence
  source: /note="Description of Artificial Sequence: Synthetic peptide"
LQSRTIPRT

SEQ ID NO: 623 - protein, 9 aa, Artificial Sequence
  source: /note="Description of Artificial Sequence: Synthetic peptide"
LQSRTIPRT

SEQ ID NO: 624 - protein, 7 aa, Artificial Sequence
  source: /note="Description of Artificial Sequence: Synthetic peptide"
GFTFSNY

SEQ ID NO: 625 - protein, 7 aa, Artificial Sequence
  source: /note="Description of Artificial Sequence: Synthetic peptide"
GFTFDDY

SEQ ID NO: 626 - protein, 7 aa, Artificial Sequence
  source: /note="Description of Artificial Sequence: Synthetic peptide"
GFALSNH

SEQ ID NO: 627 - protein, 7 aa, Artificial Sequence
  source: /note="Description of Artificial Sequence: Synthetic peptide"
GYIFDNF

SEQ ID NO: 628 - protein, 7 aa, Artificial Sequence
  source: /note="Description of Artificial Sequence: Synthetic peptide"
GFTFSSD

SEQ ID NO: 629 - protein, 7 aa, Artificial Sequence
  source: /note="Description of Artificial Sequence: Synthetic peptide"
GYTFSNY

SEQ ID NO: 630 - protein, 7 aa, Artificial Sequence
  source: /note="Description of Artificial Sequence: Synthetic peptide"
GFALSNH

SEQ ID NO: 631 - protein, 7 aa, Artificial Sequence
  source: /note="Description of Artificial Sequence: Synthetic peptide"
GFALSNH

SEQ ID NO: 632 - protein, 7 aa, Artificial Sequence
  source: /note="Description of Artificial Sequence: Synthetic peptide"
GFALSNH

SEQ ID NO: 633 - protein, 7 aa, Artificial Sequence
  source: /note="Description of Artificial Sequence: Synthetic peptide"
GFTFSDY

SEQ ID NO: 634 - protein, 7 aa, Artificial Sequence
  source: /note="Description of Artificial Sequence: Synthetic peptide"
GFALSNH

SEQ ID NO: 635 - protein, 7 aa, Artificial Sequence
  source: /note="Description of Artificial Sequence: Synthetic peptide"
GFTFSDY

SEQ ID NO: 636 - protein, 7 aa, Artificial Sequence
  source: /note="Description of Artificial Sequence: Synthetic peptide"
GFALSNH

SEQ ID NO: 637 - protein, 7 aa, Artificial Sequence
  source: /note="Description of Artificial Sequence: Synthetic peptide"
GFALSNH

SEQ ID NO: 638 - protein, 7 aa, Artificial Sequence
  source: /note="Description of Artificial Sequence: Synthetic peptide"
GFALSNH

SEQ ID NO: 639 - protein, 9 aa, Artificial Sequence
  source: /note="Description of Artificial Sequence: Synthetic peptide"
GGSISSSYY

SEQ ID NO: 640 - protein, 9 aa, Artificial Sequence
  source: /note="Description of Artificial Sequence: Synthetic peptide"
GFSLRTSGM

SEQ ID NO: 641 - protein, 7 aa, Artificial Sequence
  source: /note="Description of Artificial Sequence: Synthetic peptide"
GFTFSSY

SEQ ID NO: 642 - protein, 7 aa, Artificial Sequence
  source: /note="Description of Artificial Sequence: Synthetic peptide"
GFTFSDY

SEQ ID NO: 643 - protein, 7 aa, Artificial Sequence
  source: /note="Description of Artificial Sequence: Synthetic peptide"
GYTVTSH

SEQ ID NO: 644 - protein, 9 aa, Artificial Sequence
  source: /note="Description of Artificial Sequence: Synthetic peptide"
GGSISSGGY

SEQ ID NO: 645 - protein, 7 aa, Artificial Sequence
  source: /note="Description of Artificial Sequence: Synthetic peptide"
GGTFSSY

SEQ ID NO: 646 - protein, 9 aa, Artificial Sequence
  source: /note="Description of Artificial Sequence: Synthetic peptide"
GDSVSSNSA

SEQ ID NO: 647 - protein, 7 aa, Artificial Sequence
  source: /note="Description of Artificial Sequence: Synthetic peptide"
GFTFSSY

SEQ ID NO: 648 - protein, 7 aa, Artificial Sequence
  source: /note="Description of Artificial Sequence: Synthetic peptide"
GITFSRY

SEQ ID NO: 649 - protein, 7 aa, Artificial Sequence
  source: /note="Description of Artificial Sequence: Synthetic peptide"
GFTFSSY

SEQ ID NO: 650 - protein, 7 aa, Artificial Sequence
  source: /note="Description of Artificial Sequence: Synthetic peptide"
GFTFSSY

SEQ ID NO: 651 - protein, 7 aa, Artificial Sequence
  source: /note="Description of Artificial Sequence: Synthetic peptide"
GFTFDDY

SEQ ID NO: 652 - protein, 7 aa, Artificial Sequence
  source: /note="Description of Artificial Sequence: Synthetic peptide"
GFTFDDY

SEQ ID NO: 653 - protein, 7 aa, Artificial Sequence
  source: /note="Description of Artificial Sequence: Synthetic peptide"
GFTFSSY

SEQ ID NO: 654 - protein, 7 aa, Artificial Sequence
  source: /note="Description of Artificial Sequence: Synthetic peptide"
GFTFSSY

SEQ ID NO: 655 - protein, 7 aa, Artificial Sequence
  source: /note="Description of Artificial Sequence: Synthetic peptide"
GFTFSSY

SEQ ID NO: 656 - protein, 7 aa, Artificial Sequence
  source: /note="Description of Artificial Sequence: Synthetic peptide"
GFSFSSY

SEQ ID NO: 657 - protein, 7 aa, Artificial Sequence
  source: /note="Description of Artificial Sequence: Synthetic peptide"
GFTFSSY

SEQ ID NO: 658 - protein, 7 aa, Artificial Sequence
  source: /note="Description of Artificial Sequence: Synthetic peptide"
GFTFSSY

SEQ ID NO: 659 - protein, 7 aa, Artificial Sequence
  source: /note="Description of Artificial Sequence: Synthetic peptide"
GFTFSSY

SEQ ID NO: 660 - protein, 7 aa, Artificial Sequence
  source: /note="Description of Artificial Sequence: Synthetic peptide"
GYTFTNF

SEQ ID NO: 661 - protein, 7 aa, Artificial Sequence
  source: /note="Description of Artificial Sequence: Synthetic peptide"
GYTFTDY

SEQ ID NO: 662 - protein, 7 aa, Artificial Sequence
  source: /note="Description of Artificial Sequence: Synthetic peptide"
GYTFRHY

SEQ ID NO: 663 - protein, 7 aa, Artificial Sequence
  source: /note="Description of Artificial Sequence: Synthetic peptide"
GYTFTHY

SEQ ID NO: 664 - protein, 6 aa, Artificial Sequence
  source: /note="Description of Artificial Sequence: Synthetic peptide"
SRSGEN

SEQ ID NO: 665 - protein, 6 aa, Artificial Sequence
  source: /note="Description of Artificial Sequence: Synthetic peptide"
SWNSGS

SEQ ID NO: 666 - protein, 5 aa, Artificial Sequence
  source: /note="Description of Artificial Sequence: Synthetic peptide"
VYSGS

SEQ ID NO: 667 - protein, 6 aa, Artificial Sequence
  source: /note="Description of Artificial Sequence: Synthetic peptide"
NPKNNN

SEQ ID NO: 668 - protein, 6 aa, Artificial Sequence
  source: /note="Description of Artificial Sequence: Synthetic peptide"
SGSGGT

SEQ ID NO: 669 - protein, 6 aa, Artificial Sequence
  source: /note="Description of Artificial Sequence: Synthetic peptide"
SAYNGN

SEQ ID NO: 670 - protein, 5 aa, Artificial Sequence
  source: /note="Description of Artificial Sequence: Synthetic peptide"
VYSGS

SEQ ID NO: 671 - protein, 5 aa, Artificial Sequence
  source: /note="Description of Artificial Sequence: Synthetic peptide"
VYSGS

SEQ ID NO: 672 - protein, 5 aa, Artificial Sequence
  source: /note="Description of Artificial Sequence: Synthetic peptide"
VYSGS

SEQ ID NO: 673 - protein, 6 aa, Artificial Sequence
  source: /note="Description of Artificial Sequence: Synthetic peptide"
SSSGST

SEQ ID NO: 674 - protein, 5 aa, Artificial Sequence
  source: /note="Description of Artificial Sequence: Synthetic peptide"
VYSGS

SEQ ID NO: 675 - protein, 6 aa, Artificial Sequence
  source: /note="Description of Artificial Sequence: Synthetic peptide"
SSSGNT

SEQ ID NO: 676 - protein, 5 aa, Artificial Sequence
  source: /note="Description of Artificial Sequence: Synthetic peptide"
VYSGS

SEQ ID NO: 677 - protein, 5 aa, Artificial Sequence
  source: /note="Description of Artificial Sequence: Synthetic peptide"
VYSGS

SEQ ID NO: 678 - protein, 5 aa, Artificial Sequence
  source: /note="Description of Artificial Sequence: Synthetic peptide"
VYSGS

SEQ ID NO: 679 - protein, 5 aa, Artificial Sequence
  source: /note="Description of Artificial Sequence: Synthetic peptide"
YYSGS

SEQ ID NO: 680 - protein, 5 aa, Artificial Sequence
  source: /note="Description of Artificial Sequence: Synthetic peptide"
DWDED

SEQ ID NO: 681 - protein, 6 aa, Artificial Sequence
  source: /note="Description of Artificial Sequence: Synthetic peptide"
SSSSSY

SEQ ID NO: 682 - protein, 6 aa, Artificial Sequence
  source: /note="Description of Artificial Sequence: Synthetic peptide"
SSSGST

SEQ ID NO: 683 - protein, 6 aa, Artificial Sequence
  source: /note="Description of Artificial Sequence: Synthetic peptide"
NPSGGV

SEQ ID NO: 684 - protein, 5 aa, Artificial Sequence
  source: /note="Description of Artificial Sequence: Synthetic peptide"
YYSGS

SEQ ID NO: 685 - protein, 6 aa, Artificial Sequence
  source: /note="Description of Artificial Sequence: Synthetic peptide"
IPIFGT

SEQ ID NO: 686 - protein, 7 aa, Artificial Sequence
  source: /note="Description of Artificial Sequence: Synthetic peptide"
YYRSKWY

SEQ ID NO: 687 - protein, 6 aa, Artificial Sequence
  source: /note="Description of Artificial Sequence: Synthetic peptide"
SGSGGS

SEQ ID NO: 688 - protein, 6 aa, Artificial Sequence
  source: /note="Description of Artificial Sequence: Synthetic peptide"
SDSGVS

SEQ ID NO: 689 - protein, 6 aa, Artificial Sequence
  source: /note="Description of Artificial Sequence: Synthetic peptide"
SGSGGS

SEQ ID NO: 690 - protein, 6 aa, Artificial Sequence
  source: /note="Description of Artificial Sequence: Synthetic peptide"
SGSGGS

SEQ ID NO: 691 - protein, 6 aa, Artificial Sequence
  source: /note="Description of Artificial Sequence: Synthetic peptide"
SWNSGS

SEQ ID NO: 692 - protein, 6 aa, Artificial Sequence
  source: /note="Description of Artificial Sequence: Synthetic peptide"
NWKGNS

SEQ ID NO: 693 - protein, 6 aa, Artificial Sequence
  source: /note="Description of Artificial Sequence: Synthetic peptide"
SGSGGS

SEQ ID NO: 694 - protein, 6 aa, Artificial Sequence
  source: /note="Description of Artificial Sequence: Synthetic peptide"
SGSGGS

SEQ ID NO: 695 - protein, 6 aa, Artificial Sequence
  source: /note="Description of Artificial Sequence: Synthetic peptide"
SGSGGS

SEQ ID NO: 696 - protein, 6 aa, Artificial Sequence
  source: /note="Description of Artificial Sequence: Synthetic peptide"
SGSGGS

SEQ ID NO: 697 - protein, 6 aa, Artificial Sequence
  source: /note="Description of Artificial Sequence: Synthetic peptide"
SGSGGS

SEQ ID NO: 698 - protein, 6 aa, Artificial Sequence
  source: /note="Description of Artificial Sequence: Synthetic peptide"
SGSGGS

SEQ ID NO: 699 - protein, 6 aa, Artificial Sequence
  source: /note="Description of Artificial Sequence: Synthetic peptide"
SGSGGS

SEQ ID NO: 700 - protein, 6 aa, Artificial Sequence
  source: /note="Description of Artificial Sequence: Synthetic peptide"
NTYTGE

SEQ ID NO: 701 - protein, 6 aa, Artificial Sequence
  source: /note="Description of Artificial Sequence: Synthetic peptide"
NTETRE

SEQ ID NO: 702 - protein, 6 aa, Artificial Sequence
  source: /note="Description of Artificial Sequence: Synthetic peptide"
NTESGV

SEQ ID NO: 703 - protein, 6 aa, Artificial Sequence
  source: /note="Description of Artificial Sequence: Synthetic peptide"
NTETGE

SEQ ID NO: 704 - protein, 11 aa, Artificial Sequence
  source: /note="Description of Artificial Sequence: Synthetic peptide"
SPAHYYGGMDV

SEQ ID NO: 705 - protein, 6 aa, Artificial Sequence
  source: /note="Description of Artificial Sequence: Synthetic peptide"
HSFLAY

SEQ ID NO: 706 - protein, 7 aa, Artificial Sequence
  source: /note="Description of Artificial Sequence: Synthetic peptide"
HGGESDV

SEQ ID NO: 707 - protein, 11 aa, Artificial Sequence
  source: /note="Description of Artificial Sequence: Synthetic peptide"
GPYYYQSYMDV

SEQ ID NO: 708 - protein, 14 aa, Artificial Sequence
  source: /note="Description of Artificial Sequence: Synthetic peptide"
LDSSGYYYARGPRY

SEQ ID NO: 709 - protein, 9 aa, Artificial Sequence
  source: /note="Description of Artificial Sequence: Synthetic peptide"
GPYYYYMDV

SEQ ID NO: 710 - protein, 7 aa, Artificial Sequence
  source: /note="Description of Artificial Sequence: Synthetic peptide"
HGGESDV

SEQ ID NO: 711 - protein, 7 aa, Artificial Sequence
  source: /note="Description of Artificial Sequence: Synthetic peptide"
HGGESDV

SEQ ID NO: 712 - protein, 7 aa, Artificial Sequence
  source: /note="Description of Artificial Sequence: Synthetic peptide"
HGGESDV

SEQ ID NO: 713 - protein, 8 aa, Artificial Sequence
  source: /note="Description of Artificial Sequence: Synthetic peptide"
ESGDGMDV

SEQ ID NO: 714 - protein, 7 aa, Artificial Sequence
  source: /note="Description of Artificial Sequence: Synthetic peptide"
HGGESDV

SEQ ID NO: 715 - protein, 8 aa, Artificial Sequence
  source: /note="Description of Artificial Sequence: Synthetic peptide"
STMVREDY

SEQ ID NO: 716 - protein, 7 aa, Artificial Sequence
  source: /note="Description of Artificial Sequence: Synthetic peptide"
HGGESDV

SEQ ID NO: 717 - protein, 7 aa, Artificial Sequence
  source: /note="Description of Artificial Sequence: Synthetic peptide"
HGGESDV

SEQ ID NO: 718 - protein, 7 aa, Artificial Sequence
  source: /note="Description of Artificial Sequence: Synthetic peptide"
HGGESDV

SEQ ID NO: 719 - protein, 11 aa, Artificial Sequence
  source: /note="Description of Artificial Sequence: Synthetic peptide"
HWQEWPDAFDI

SEQ ID NO: 720 - protein, 13 aa, Artificial Sequence
  source: /note="Description of Artificial Sequence: Synthetic peptide"
SGAGGTSATAFDI

SEQ ID NO: 721 - protein, 10 aa, Artificial Sequence
  source: /note="Description of Artificial Sequence: Synthetic peptide"
TIAAVYAFDI

SEQ ID NO: 722 - protein, 8 aa, Artificial Sequence
  source: /note="Description of Artificial Sequence: Synthetic peptide"
DLRGAFDI

SEQ ID NO: 723 - protein, 11 aa, Artificial Sequence
  source: /note="Description of Artificial Sequence: Synthetic peptide"
EGSGSGWYFDF

SEQ ID NO: 724 - protein, 13 aa, Artificial Sequence
  source: /note="Description of Artificial Sequence: Synthetic peptide"
AGIAARLRGAFDI

SEQ ID NO: 725 - protein, 20 aa, Artificial Sequence
  source: /note="Description of Artificial Sequence: Synthetic peptide"
RGGYQLLRWDVGLLRSAFDI

SEQ ID NO: 726 - protein, 13 aa, Artificial Sequence
  source: /note="Description of Artificial Sequence: Synthetic peptide"
SSPEGLFLYWFDP

SEQ ID NO: 727 - protein, 9 aa, Artificial Sequence
  source: /note="Description of Artificial Sequence: Synthetic peptide"
VEGSGSLDY

SEQ ID NO: 728 - protein, 9 aa, Artificial Sequence
  source: /note="Description of Artificial Sequence: Synthetic peptide"
RAGSEASDI

SEQ ID NO: 729 - protein, 15 aa, Artificial Sequence
  source: /note="Description of Artificial Sequence: Synthetic peptide"
ATYKRELRYYYGMDV

SEQ ID NO: 730 - protein, 15 aa, Artificial Sequence
  source: /note="Description of Artificial Sequence: Synthetic peptide"
ATYKRELRYYYGMDV

SEQ ID NO: 731 - protein, 8 aa, Artificial Sequence
  source: /note="Description of Artificial Sequence: Synthetic peptide"
VGKAVPDV

SEQ ID NO: 732 - protein, 13 aa, Artificial Sequence
  source: /note="Description of Artificial Sequence: Synthetic peptide"
HQGVAYYNYAMDV

SEQ ID NO: 733 - protein, 8 aa, Artificial Sequence
  source: /note="Description of Artificial Sequence: Synthetic peptide"
VVRDGMDV

SEQ ID NO: 734 - protein, 9 aa, Artificial Sequence
  source: /note="Description of Artificial Sequence: Synthetic peptide"
IPQTGTFDY

SEQ ID NO: 735 - protein, 15 aa, Artificial Sequence
  source: /note="Description of Artificial Sequence: Synthetic peptide"
ANYKRELRYYYGMDV

SEQ ID NO: 736 - protein, 11 aa, Artificial Sequence
  source: /note="Description of Artificial Sequence: Synthetic peptide"
ALVGATGAFDI

SEQ ID NO: 737 - protein, 8 aa, Artificial Sequence
  source: /note="Description of Artificial Sequence: Synthetic peptide"
WFGEGFDP

SEQ ID NO: 738 - protein, 17 aa, Artificial Sequence
  source: /note="Description of Artificial Sequence: Synthetic peptide"
VGYDSSGYYRDYYGMDV

SEQ ID NO: 739 - protein, 13 aa, Artificial Sequence
  source: /note="Description of Artificial Sequence: Synthetic peptide"
MGWSSGYLGAFDI

SEQ ID NO: 740 - protein, 13 aa, Artificial Sequence
  source: /note="Description of Artificial Sequence: Synthetic peptide"
GEIYYGYDGGFAY

SEQ ID NO: 741 - protein, 8 aa, Artificial Sequence
  source: /note="Description of Artificial Sequence: Synthetic peptide"
DYSYAMDY

SEQ ID NO: 742 - protein, 8 aa, Artificial Sequence
  source: /note="Description of Artificial Sequence: Synthetic peptide"
DYLYSLDF

SEQ ID NO: 743 - protein, 8 aa, Artificial Sequence
  source: /note="Description of Artificial Sequence: Synthetic peptide"
DYLYSCDY

SEQ ID NO: 744 - protein, 8 aa, Artificial Sequence
  source: /note="Description of Artificial Sequence: Synthetic peptide"
SQSISSSF

SEQ ID NO: 745 - protein, 12 aa, Artificial Sequence
  source: /note="Description of Artificial Sequence: Synthetic peptide"
SQSLLHSNGYNY

SEQ ID NO: 746 - protein, 12 aa, Artificial Sequence
  source: /note="Description of Artificial Sequence: Synthetic peptide"
SQSLLRNDGKTP

SEQ ID NO: 747 - protein, 12 aa, Artificial Sequence
  source: /note="Description of Artificial Sequence: Synthetic peptide"
SQSLLHSNGYNY

SEQ ID NO: 748 - protein, 7 aa, Artificial Sequence
  source: /note="Description of Artificial Sequence: Synthetic peptide"
SQSISSY

SEQ ID NO: 749 - protein, 12 aa, Artificial Sequence
  source: /note="Description of Artificial Sequence: Synthetic peptide"
SQSLLYSNGYNY

SEQ ID NO: 750 - protein, 7 aa, Artificial Sequence
  source: /note="Description of Artificial Sequence: Synthetic peptide"
SQSVSSN

SEQ ID NO: 751 - protein, 7 aa, Artificial Sequence
  source: /note="Description of Artificial Sequence: Synthetic peptide"
SQSVSSK

SEQ ID NO: 752 - protein, 8 aa, Artificial Sequence
  source: /note="Description of Artificial Sequence: Synthetic peptide"
SQSVGSTN

SEQ ID NO: 753 - protein, 7 aa, Artificial Sequence
  source: /note="Description of Artificial Sequence: Synthetic peptide"
SQSISSY

SEQ ID NO: 754 - protein, 7 aa, Artificial Sequence
  source: /note="Description of Artificial Sequence: Synthetic peptide"
SQSISSY

SEQ ID NO: 755 - protein, 12 aa, Artificial Sequence
  source: /note="Description of Artificial Sequence: Synthetic peptide"
SESLVHNSGKTY

SEQ ID NO: 756 - protein, 7 aa, Artificial Sequence
  source: /note="Description of Artificial Sequence: Synthetic peptide"
SEDINKF

SEQ ID NO: 757 - protein, 7 aa, Artificial Sequence
  source: /note="Description of Artificial Sequence: Synthetic peptide"
SQSVGSN

SEQ ID NO: 758 - protein, 8 aa, Artificial Sequence
  source: /note="Description of Artificial Sequence: Synthetic peptide"
SQSIGSSS

SEQ ID NO: 759 - protein, 7 aa, Artificial Sequence
  source: /note="Description of Artificial Sequence: Synthetic peptide"
SQDIDDA

SEQ ID NO: 760 - protein, 7 aa, Artificial Sequence
  source: /note="Description of Artificial Sequence: Synthetic peptide"
SQDIYNN

SEQ ID NO: 761 - protein, 12 aa, Artificial Sequence
  source: /note="Description of Artificial Sequence: Synthetic peptide"
SQSLLHSNGYNY

SEQ ID NO: 762 - protein, 7 aa, Artificial Sequence
  source: /note="Description of Artificial Sequence: Synthetic peptide"
NNIGTKS

SEQ ID NO: 763 - protein, 7 aa, Artificial Sequence
  source: /note="Description of Artificial Sequence: Synthetic peptide"
DGLSKKY

SEQ ID NO: 764 - protein, 7 aa, Artificial Sequence
  source: /note="Description of Artificial Sequence: Synthetic peptide"
SQGIRNW

SEQ ID NO: 765 - protein, 7 aa, Artificial Sequence
  source: /note="Description of Artificial Sequence: Synthetic peptide"
NNIGSKS

SEQ ID NO: 766 - protein, 7 aa, Artificial Sequence
  source: /note="Description of Artificial Sequence: Synthetic peptide"
DSLGNYY

SEQ ID NO: 767 - protein, 8 aa, Artificial Sequence
  source: /note="Description of Artificial Sequence: Synthetic peptide"
SQSVSSAY

SEQ ID NO: 768 - protein, 7 aa, Artificial Sequence
  source: /note="Description of Artificial Sequence: Synthetic peptide"
SQSVSNS

SEQ ID NO: 769 - protein, 8 aa, Artificial Sequence
  source: /note="Description of Artificial Sequence: Synthetic peptide"
SQSVSSSF

SEQ ID NO: 770 - protein, 8 aa, Artificial Sequence
  source: /note="Description of Artificial Sequence: Synthetic peptide"
SQSVSTTF

SEQ ID NO: 771 - protein, 7 aa, Artificial Sequence
  source: /note="Description of Artificial Sequence: Synthetic peptide"
SQSISSY

SEQ ID NO: 772 - protein, 8 aa, Artificial Sequence
  source: /note="Description of Artificial Sequence: Synthetic peptide"
TQSIGSSF

SEQ ID NO: 773 - protein, 8 aa, Artificial Sequence
  source: /note="Description of Artificial Sequence: Synthetic peptide"
SQSVSSSY

SEQ ID NO: 774 - protein, 8 aa, Artificial Sequence
  source: /note="Description of Artificial Sequence: Synthetic peptide"
SQSVSSSY

SEQ ID NO: 775 - protein, 8 aa, Artificial Sequence
  source: /note="Description of Artificial Sequence: Synthetic peptide"
SQRVASNY

SEQ ID NO: 776 - protein, 8 aa, Artificial Sequence
  source: /note="Description of Artificial Sequence: Synthetic peptide"
SQSLSSNF

SEQ ID NO: 777 - protein, 12 aa, Artificial Sequence
  source: /note="Description of Artificial Sequence: Synthetic peptide"
SQSLLHSNGYNY

SEQ ID NO: 778 - protein, 8 aa, Artificial Sequence
  source: /note="Description of Artificial Sequence: Synthetic peptide"
SQSVSSSY

SEQ ID NO: 779 - protein, 8 aa, Artificial Sequence
  source: /note="Description of Artificial Sequence: Synthetic peptide"
SQSVASSF

SEQ ID NO: 780 - protein, 7 aa, Artificial Sequence
  source: /note="Description of Artificial Sequence: Synthetic peptide"
SQDVNTA

SEQ ID NO: 781 - protein, 11 aa, Artificial Sequence
  source: /note="Description of Artificial Sequence: Synthetic peptide"
SESVSVIGAHL

SEQ ID NO: 782 - protein, 11 aa, Artificial Sequence
  source: /note="Description of Artificial Sequence: Synthetic peptide"
SESVTILGSHL

SEQ ID NO: 783 - protein, 11 aa, Artificial Sequence
  source: /note="Description of Artificial Sequence: Synthetic peptide"
SESVTILGSHL

SEQ ID NO: 784 - protein, 3 aa, Artificial Sequence
  source: /note="Description of Artificial Sequence: Synthetic peptide"
GAS

SEQ ID NO: 785 - protein, 3 aa, Artificial Sequence
  source: /note="Description of Artificial Sequence: Synthetic peptide"
LGS

SEQ ID NO: 786 - protein, 3 aa, Artificial Sequence
  source: /note="Description of Artificial Sequence: Synthetic peptide"
EVS

SEQ ID NO: 787 - protein, 3 aa, Artificial Sequence
  source: /note="Description of Artificial Sequence: Synthetic peptide"
LGS

SEQ ID NO: 788 - protein, 3 aa, Artificial Sequence
  source: /note="Description of Artificial Sequence: Synthetic peptide"
GAS

SEQ ID NO: 789 - protein, 3 aa, Artificial Sequence
  source: /note="Description of Artificial Sequence: Synthetic peptide"
LGS

SEQ ID NO: 790 - protein, 3 aa, Artificial Sequence
  source: /note="Description of Artificial Sequence: Synthetic peptide"
GAS

SEQ ID NO: 791 - protein, 3 aa, Artificial Sequence
  source: /note="Description of Artificial Sequence: Synthetic peptide"
GAS

SEQ ID NO: 792 - protein, 3 aa, Artificial Sequence
  source: /note="Description of Artificial Sequence: Synthetic peptide"
DAS

SEQ ID NO: 793 - protein, 3 aa, Artificial Sequence
  source: /note="Description of Artificial Sequence: Synthetic peptide"
AAS

SEQ ID NO: 794 - protein, 3 aa, Artificial Sequence
  source: /note="Description of Artificial Sequence: Synthetic peptide"
AAS

SEQ ID NO: 795 - protein, 3 aa, Artificial Sequence
  source: /note="Description of Artificial Sequence: Synthetic peptide"
EVS

SEQ ID NO: 796 - protein, 3 aa, Artificial Sequence
  source: /note="Description of Artificial Sequence: Synthetic peptide"
DAS

SEQ ID NO: 797 - protein, 3 aa, Artificial Sequence
  source: /note="Description of Artificial Sequence: Synthetic peptide"
GAS

SEQ ID NO: 798 - protein, 3 aa, Artificial Sequence
  source: /note="Description of Artificial Sequence: Synthetic peptide"
GAS

SEQ ID NO: 799 - protein, 3 aa, Artificial Sequence
  source: /note="Description of Artificial Sequence: Synthetic peptide"
SAT

SEQ ID NO: 800 - protein, 3 aa, Artificial Sequence
  source: /note="Description of Artificial Sequence: Synthetic peptide"
AAN

SEQ ID NO: 801 - protein, 3 aa, Artificial Sequence
  source: /note="Description of Artificial Sequence: Synthetic peptide"
LGS

SEQ ID NO: 802 - protein, 3 aa, Artificial Sequence
  source: /note="Description of Artificial Sequence: Synthetic peptide"
DDS

SEQ ID NO: 803 - protein, 3 aa, Artificial Sequence
  source: /note="Description of Artificial Sequence: Synthetic peptide"
RDK

SEQ ID NO: 804 - protein, 3 aa, Artificial Sequence
  source: /note="Description of Artificial Sequence: Synthetic peptide"
AAS

SEQ ID NO: 805 - protein, 3 aa, Artificial Sequence
  source: /note="Description of Artificial Sequence: Synthetic peptide"
GKN

SEQ ID NO: 806 - protein, 3 aa, Artificial Sequence
  source: /note="Description of Artificial Sequence: Synthetic peptide"
GTN

SEQ ID NO: 807 - protein, 3 aa, Artificial Sequence
  source: /note="Description of Artificial Sequence: Synthetic peptide"
GAS

SEQ ID NO: 808 - protein, 3 aa, Artificial Sequence
  source: /note="Description of Artificial Sequence: Synthetic peptide"
DAS

SEQ ID NO: 809 - protein, 3 aa, Artificial Sequence
  source: /note="Description of Artificial Sequence: Synthetic peptide"
GAS

SEQ ID NO: 810 - protein, 3 aa, Artificial Sequence
  source: /note="Description of Artificial Sequence: Synthetic peptide"
GSS

SEQ ID NO: 811 - protein, 3 aa, Artificial Sequence
  source: /note="Description of Artificial Sequence: Synthetic peptide"
AAS

SEQ ID NO: 812 - protein, 3 aa, Artificial Sequence
  source: /note="Description of Artificial Sequence: Synthetic peptide"
GAS

SEQ ID NO: 813 - protein, 3 aa, Artificial Sequence
  source: /note="Description of Artificial Sequence: Synthetic peptide"
GAS

SEQ ID NO: 814 - protein, 3 aa, Artificial Sequence
  source: /note="Description of Artificial Sequence: Synthetic peptide"
GAS

SEQ ID NO: 815 - protein, 3 aa, Artificial Sequence
  source: /note="Description of Artificial Sequence: Synthetic peptide"
GAS

SEQ ID NO: 816 - protein, 3 aa, Artificial Sequence
  source: /note="Description of Artificial Sequence: Synthetic peptide"
GAS

SEQ ID NO: 817 - protein, 3 aa, Artificial Sequence
  source: /note="Description of Artificial Sequence: Synthetic peptide"
LGS

SEQ ID NO: 818 - protein, 3 aa, Artificial Sequence
  source: /note="Description of Artificial Sequence: Synthetic peptide"
GTS

SEQ ID NO: 819 - protein, 3 aa, Artificial Sequence
  source: /note="Description of Artificial Sequence: Synthetic peptide"
GAS

SEQ ID NO: 820 - protein, 3 aa, Artificial Sequence
  source: /note="Description of Artificial Sequence: Synthetic peptide"
SAS

SEQ ID NO: 821 - protein, 3 aa, Artificial Sequence
  source: /note="Description of Artificial Sequence: Synthetic peptide"
LAS

SEQ ID NO: 822 - protein, 3 aa, Artificial Sequence
  source: /note="Description of Artificial Sequence: Synthetic peptide"
LAS

SEQ ID NO: 823 - protein, 3 aa, Artificial Sequence
  source: /note="Description of Artificial Sequence: Synthetic peptide"
LAS

SEQ ID NO: 824 - protein, 7 aa, Artificial Sequence
  source: /note="Description of Artificial Sequence: Synthetic peptide"
YHSSPSW

SEQ ID NO: 825 - protein, 6 aa, Artificial Sequence
  source: /note="Description of Artificial Sequence: Synthetic peptide"
ALQTPY

SEQ ID NO: 826 - protein, 5 aa, Artificial Sequence
  source: /note="Description of Artificial Sequence: Synthetic peptide"
NIQFP

SEQ ID NO: 827 - protein, 6 aa, Artificial Sequence
  source: /note="Description of Artificial Sequence: Synthetic peptide"
ALQTPY

SEQ ID NO: 828 - protein, 5 aa, Artificial Sequence
  source: /note="Description of Artificial Sequence: Synthetic peptide"
SYKRA

SEQ ID NO: 829 - protein, 6 aa, Artificial Sequence
  source: /note="Description of Artificial Sequence: Synthetic peptide"
GRQFPY

SEQ ID NO: 830 - protein, 5 aa, Artificial Sequence
  source: /note="Description of Artificial Sequence: Synthetic peptide"
YGSSL

SEQ ID NO: 831 - protein, 6 aa, Artificial Sequence
  source: /note="Description of Artificial Sequence: Synthetic peptide"
YGSSSW

SEQ ID NO: 832 - protein, 7 aa, Artificial Sequence
  source: /note="Description of Artificial Sequence: Synthetic peptide"
YGSSPPW

SEQ ID NO: 833 - protein, 4 aa, Artificial Sequence
  source: /note="Description of Artificial Sequence: Synthetic peptide"
SYTL

SEQ ID NO: 834 - protein, 6 aa, Artificial Sequence
  source: /note="Description of Artificial Sequence: Synthetic peptide"
SYSTPY

SEQ ID NO: 835 - protein, 6 aa, Artificial Sequence
  source: /note="Description of Artificial Sequence: Synthetic peptide"
GTHWPG

SEQ ID NO: 836 - protein, 6 aa, Artificial Sequence
  source: /note="Description of Artificial Sequence: Synthetic peptide"
YESLPL

SEQ ID NO: 837 - protein, 7 aa, Artificial Sequence
  source: /note="Description of Artificial Sequence: Synthetic peptide"
YNDWLPV

SEQ ID NO: 838 - protein, 7 aa, Artificial Sequence
  source: /note="Description of Artificial Sequence: Synthetic peptide"
YAGSPPF

SEQ ID NO: 839 - protein, 6 aa, Artificial Sequence
  source: /note="Description of Artificial Sequence: Synthetic peptide"
HDNFPL

SEQ ID NO: 840 - protein, 6 aa, Artificial Sequence
  source: /note="Description of Artificial Sequence: Synthetic peptide"
YYRFPY

SEQ ID NO: 841 - protein, 6 aa, Artificial Sequence
  source: /note="Description of Artificial Sequence: Synthetic peptide"
ALQTPY

SEQ ID NO: 842 - protein, 8 aa, Artificial Sequence
  source: /note="Description of Artificial Sequence: Synthetic peptide"
WDSDSEHV

SEQ ID NO: 843 - protein, 6 aa, Artificial Sequence
  source: /note="Description of Artificial Sequence: Synthetic peptide"
WDDTTV

SEQ ID NO: 844 - protein, 6 aa, Artificial Sequence
  source: /note="Description of Artificial Sequence: Synthetic peptide"
YNSAPF

SEQ ID NO: 845 - protein, 9 aa, Artificial Sequence
  source: /note="Description of Artificial Sequence: Synthetic peptide"
RDSSGDHLR

SEQ ID NO: 846 - protein, 8 aa, Artificial Sequence
  source: /note="Description of Artificial Sequence: Synthetic peptide"
RDSSGHHL

SEQ ID NO: 847 - protein, 11 aa, Artificial Sequence
  source: /note="Description of Artificial Sequence: Synthetic peptide"
YGSSFNGSSLF

SEQ ID NO: 848 - protein, 7 aa, Artificial Sequence
  source: /note="Description of Artificial Sequence: Synthetic peptide"
FGTSSGL

SEQ ID NO: 849 - protein, 7 aa, Artificial Sequence
  source: /note="Description of Artificial Sequence: Synthetic peptide"
YHSSPSW

SEQ ID NO: 850 - protein, 7 aa, Artificial Sequence
  source: /note="Description of Artificial Sequence: Synthetic peptide"
YHSSPSW

SEQ ID NO: 851 - protein, 6 aa, Artificial Sequence
  source: /note="Description of Artificial Sequence: Synthetic peptide"
SYSTPY

SEQ ID NO: 852 - protein, 7 aa, Artificial Sequence
  source: /note="Description of Artificial Sequence: Synthetic peptide"
YESSPSW

SEQ ID NO: 853 - protein, 7 aa, Artificial Sequence
  source: /note="Description of Artificial Sequence: Synthetic peptide"
YGSPPRF

SEQ ID NO: 854 - protein, 7 aa, Artificial Sequence
  source: /note="Description of Artificial Sequence: Synthetic peptide"
YGSSPSW

SEQ ID NO: 855 - protein, 7 aa, Artificial Sequence
  source: /note="Description of Artificial Sequence: Synthetic peptide"
YDSSPSW

SEQ ID NO: 856 - protein, 7 aa, Artificial Sequence
  source: /note="Description of Artificial Sequence: Synthetic peptide"
YGTSPMY

SEQ ID NO: 857 - protein, 6 aa, Artificial Sequence
  source: /note="Description of Artificial Sequence: Synthetic peptide"
ALQTPL

SEQ ID NO: 858 - protein, 8 aa, Artificial Sequence
  source: /note="Description of Artificial Sequence: Synthetic peptide"
YGNSPPKF

SEQ ID NO: 859 - protein, 7 aa, Artificial Sequence
  source: /note="Description of Artificial Sequence: Synthetic peptide"
YGGSPRL

SEQ ID NO: 860 - protein, 6 aa, Artificial Sequence
  source: /note="Description of Artificial Sequence: Synthetic peptide"
HYSTPW

SEQ ID NO: 861 - protein, 6 aa, Artificial Sequence
  source: /note="Description of Artificial Sequence: Synthetic peptide"
SRIFPR

SEQ ID NO: 862 - protein, 6 aa, Artificial Sequence
  source: /note="Description of Artificial Sequence: Synthetic peptide"
SRTIPR

SEQ ID NO: 863 - protein, 6 aa, Artificial Sequence
  source: /note="Description of Artificial Sequence: Synthetic peptide"
SRTIPR

SEQ ID NO: 864 - protein, 10 aa, Artificial Sequence
  source: /note="Description of Artificial Sequence: Synthetic peptide"
GFTFSNYAMS

SEQ ID NO: 865 - protein, 10 aa, Artificial Sequence
  source: /note="Description of Artificial Sequence: Synthetic peptide"
GFTFDDYAMH

SEQ ID NO: 866 - protein, 10 aa, Artificial Sequence
  source: /note="Description of Artificial Sequence: Synthetic peptide"
GFALSNHGMS

SEQ ID NO: 867 - protein, 10 aa, Artificial Sequence
  source: /note="Description of Artificial Sequence: Synthetic peptide"
GYIFDNFGIN

SEQ ID NO: 868 - protein, 10 aa, Artificial Sequence
  source: /note="Description of Artificial Sequence: Synthetic peptide"
GFTFSSDAMT

SEQ ID NO: 869 - protein, 10 aa, Artificial Sequence
  source: /note="Description of Artificial Sequence: Synthetic peptide"
GYTFSNYGIT

SEQ ID NO: 870 - protein, 10 aa, Artificial Sequence
  source: /note="Description of Artificial Sequence: Synthetic peptide"
GFALSNHGMS

SEQ ID NO: 871 - protein, 10 aa, Artificial Sequence
  source: /note="Description of Artificial Sequence: Synthetic peptide"
GFALSNHGMS

SEQ ID NO: 872 - protein, 10 aa, Artificial Sequence
  source: /note="Description of Artificial Sequence: Synthetic peptide"
GFALSNHGMS

SEQ ID NO: 873 - protein, 10 aa, Artificial Sequence
  source: /note="Description of Artificial Sequence: Synthetic peptide"
GFTFSDYYMS

SEQ ID NO: 874 - protein, 10 aa, Artificial Sequence
  source: /note="Description of Artificial Sequence: Synthetic peptide"
GFALSNHGMS

SEQ ID NO: 875 - protein, 10 aa, Artificial Sequence
  source: /note="Description of Artificial Sequence: Synthetic peptide"
GFTFSDYYMS

SEQ ID NO: 876 - protein, 10 aa, Artificial Sequence
  source: /note="Description of Artificial Sequence: Synthetic peptide"
GFALSNHGMS

SEQ ID NO: 877 - protein, 10 aa, Artificial Sequence
  source: /note="Description of Artificial Sequence: Synthetic peptide"
GFALSNHGMS

SEQ ID NO: 878 - protein, 10 aa, Artificial Sequence
  source: /note="Description of Artificial Sequence: Synthetic peptide"
GFALSNHGMS

SEQ ID NO: 879 - protein, 12 aa, Artificial Sequence
  source: /note="Description of Artificial Sequence: Synthetic peptide"
GGSISSSYYYWG

SEQ ID NO: 880 - protein, 12 aa, Artificial Sequence
  source: /note="Description of Artificial Sequence: Synthetic peptide"
GFSLRTSGMCVS

SEQ ID NO: 881 - protein, 10 aa, Artificial Sequence
  source: /note="Description of Artificial Sequence: Synthetic peptide"
GFTFSSYSMN

SEQ ID NO: 882 - protein, 10 aa, Artificial Sequence
  source: /note="Description of Artificial Sequence: Synthetic peptide"
GFTFSDYYMS

SEQ ID NO: 883 - protein, 10 aa, Artificial Sequence
  source: /note="Description of Artificial Sequence: Synthetic peptide"
GYTVTSHYIH

SEQ ID NO: 884 - protein, 12 aa, Artificial Sequence
  source: /note="Description of Artificial Sequence: Synthetic peptide"
GGSISSGGYYWS

SEQ ID NO: 885 - protein, 10 aa, Artificial Sequence
  source: /note="Description of Artificial Sequence: Synthetic peptide"
GGTFSSYAIS

SEQ ID NO: 886 - protein, 12 aa, Artificial Sequence
  source: /note="Description of Artificial Sequence: Synthetic peptide"
GDSVSSNSAAWN

SEQ ID NO: 887 - protein, 10 aa, Artificial Sequence
  source: /note="Description of Artificial Sequence: Synthetic peptide"
GFTFSSYAMS

SEQ ID NO: 888 - protein, 10 aa, Artificial Sequence
  source: /note="Description of Artificial Sequence: Synthetic peptide"
GITFSRYPMS

SEQ ID NO: 889 - protein, 10 aa, Artificial Sequence
  source: /note="Description of Artificial Sequence: Synthetic peptide"
GFTFSSYAMS

SEQ ID NO: 890 - protein, 10 aa, Artificial Sequence
  source: /note="Description of Artificial Sequence: Synthetic peptide"
GFTFSSYAMS

SEQ ID NO: 891 - protein, 10 aa, Artificial Sequence
  source: /note="Description of Artificial Sequence: Synthetic peptide"
GFTFDDYAMH

SEQ ID NO: 892 - protein, 10 aa, Artificial Sequence
  source: /note="Description of Artificial Sequence: Synthetic peptide"
GFTFDDYAMH

SEQ ID NO: 893 - protein, 10 aa, Artificial Sequence
  source: /note="Description of Artificial Sequence: Synthetic peptide"
GFTFSSYAMS

SEQ ID NO: 894 - protein, 10 aa, Artificial Sequence
  source: /note="Description of Artificial Sequence: Synthetic peptide"
GFTFSSYAMS

SEQ ID NO: 895 - protein, 10 aa, Artificial Sequence
  source: /note="Description of Artificial Sequence: Synthetic peptide"
GFTFSSYAMS

SEQ ID NO: 896 - protein, 10 aa, Artificial Sequence
  source: /note="Description of Artificial Sequence: Synthetic peptide"
GFSFSSYAMS

SEQ ID NO: 897 - protein, 10 aa, Artificial Sequence
  source: /note="Description of Artificial Sequence: Synthetic peptide"
GFTFSSYAMS

SEQ ID NO: 898 - protein, 10 aa, Artificial Sequence
  source: /note="Description of Artificial Sequence: Synthetic peptide"
GFTFSSYAMS

SEQ ID NO: 899 - protein, 10 aa, Artificial Sequence
  source: /note="Description of Artificial Sequence: Synthetic peptide"
GFTFSSYAMS

SEQ ID NO: 900 - protein, 10 aa, Artificial Sequence
  source: /note="Description of Artificial Sequence: Synthetic peptide"
GYTFTNFGMN

SEQ ID NO: 901 - protein, 10 aa, Artificial Sequence
  source: /note="Description of Artificial Sequence: Synthetic peptide"
GYTFTDYSIN

SEQ ID NO: 902 - protein, 10 aa, Artificial Sequence
  source: /note="Description of Artificial Sequence: Synthetic peptide"
GYTFRHYSMN

SEQ ID NO: 903 - protein, 10 aa, Artificial Sequence
  source: /note="Description of Artificial Sequence: Synthetic peptide"
GYTFTHYSMN

SEQ ID NO: 904 - protein, 17 aa, Artificial Sequence
  source: /note="Description of Artificial Sequence: Synthetic peptide"
GISRSGENTYYADSVKG

SEQ ID NO: 905 - protein, 17 aa, Artificial Sequence
  source: /note="Description of Artificial Sequence: Synthetic peptide"
GISWNSGSIGYADSVKG

SEQ ID NO: 906 - protein, 16 aa, Artificial Sequence
  source: /note="Description of Artificial Sequence: Synthetic peptide"
GIVYSGSTYYAASVKG

SEQ ID NO: 907 - protein, 17 aa, Artificial Sequence
  source: /note="Description of Artificial Sequence: Synthetic peptide"
WINPKNNNTNYAQKFQG

SEQ ID NO: 908 - protein, 17 aa, Artificial Sequence
  source: /note="Description of Artificial Sequence: Synthetic peptide"
VISGSGGTTYYADSVKG

SEQ ID NO: 909 - protein, 17 aa, Artificial Sequence
  source: /note="Description of Artificial Sequence: Synthetic peptide"
WISAYNGNTNYAQKFQG

SEQ ID NO: 910 - protein, 16 aa, Artificial Sequence
  source: /note="Description of Artificial Sequence: Synthetic peptide"
GIVYSGSTYYAASVKG

SEQ ID NO: 911 - protein, 16 aa, Artificial Sequence
  source: /note="Description of Artificial Sequence: Synthetic peptide"
GIVYSGSTYYAASVKG

SEQ ID NO: 912 - protein, 16 aa, Artificial Sequence
  source: /note="Description of Artificial Sequence: Synthetic peptide"
GIVYSGSTYYAASVKG

SEQ ID NO: 913 - protein, 17 aa, Artificial Sequence
  source: /note="Description of Artificial Sequence: Synthetic peptide"
YISSSGSTIYYADSVKG

SEQ ID NO: 914 - protein, 16 aa, Artificial Sequence
  source: /note="Description of Artificial Sequence: Synthetic peptide"
GIVYSGSTYYAASVKG

SEQ ID NO: 915 - protein, 17 aa, Artificial Sequence
  source: /note="Description of Artificial Sequence: Synthetic peptide"
YISSSGNTIYYADSVKG

SEQ ID NO: 916 - protein, 16 aa, Artificial Sequence
  source: /note="Description of Artificial Sequence: Synthetic peptide"
GIVYSGSTYYAASVKG

SEQ ID NO: 917 - protein, 16 aa, Artificial Sequence
  source: /note="Description of Artificial Sequence: Synthetic peptide"
GIVYSGSTYYAASVKG

SEQ ID NO: 918 - protein, 16 aa, Artificial Sequence
  source: /note="Description of Artificial Sequence: Synthetic peptide"
GIVYSGSTYYAASVKG

SEQ ID NO: 919 - protein, 16 aa, Artificial Sequence
  source: /note="Description of Artificial Sequence: Synthetic peptide"
SIYYSGSAYYNPSLKS

SEQ ID NO: 920 - protein, 16 aa, Artificial Sequence
  source: /note="Description of Artificial Sequence: Synthetic peptide"
RIDWDEDKFYSTSLKT

SEQ ID NO: 921 - protein, 17 aa, Artificial Sequence
  source: /note="Description of Artificial Sequence: Synthetic peptide"
SISSSSSYIYYADSVKG

SEQ ID NO: 922 - protein, 17 aa, Artificial Sequence
  source: /note="Description of Artificial Sequence: Synthetic peptide"
YISSSGSTIYYADSVKG

SEQ ID NO: 923 - protein, 17 aa, Artificial Sequence
  source: /note="Description of Artificial Sequence: Synthetic peptide"
MINPSGGVTAYSQTLQG

SEQ ID NO: 924 - protein, 16 aa, Artificial Sequence
  source: /note="Description of Artificial Sequence: Synthetic peptide"
YIYYSGSTYYNPSLKS

SEQ ID NO: 925 - protein, 17 aa, Artificial Sequence
  source: /note="Description of Artificial Sequence: Synthetic peptide"
GIIPIFGTANYAQKFQG

SEQ ID NO: 926 - protein, 18 aa, Artificial Sequence
  source: /note="Description of Artificial Sequence: Synthetic peptide"
RTYYRSKWYSFYAISLKS

SEQ ID NO: 927 - protein, 17 aa, Artificial Sequence
  source: /note="Description of Artificial Sequence: Synthetic peptide"
AISGSGGSTYYADSVKG

SEQ ID NO: 928 - protein, 17 aa, Artificial Sequence
  source: /note="Description of Artificial Sequence: Synthetic peptide"
GISDSGVSTYYADSAKG

SEQ ID NO: 929 - protein, 17 aa, Artificial Sequence
  source: /note="Description of Artificial Sequence: Synthetic peptide"
AISGSGGSTYYADSVKG

SEQ ID NO: 930 - protein, 17 aa, Artificial Sequence
  source: /note="Description of Artificial Sequence: Synthetic peptide"
AISGSGGSTYYADSVKG

SEQ ID NO: 931 - protein, 17 aa, Artificial Sequence
  source: /note="Description of Artificial Sequence: Synthetic peptide"
GISWNSGSIGYADSVKG

SEQ ID NO: 932 - protein, 17 aa, Artificial Sequence
  source: /note="Description of Artificial Sequence: Synthetic peptide"
SINWKGNSLAYGDSVKG

SEQ ID NO: 933 - protein, 17 aa, Artificial Sequence
  source: /note="Description of Artificial Sequence: Synthetic peptide"
AISGSGGSTYYADSVKG

SEQ ID NO: 934 - protein, 17 aa, Artificial Sequence
  source: /note="Description of Artificial Sequence: Synthetic peptide"
AISGSGGSTYYADSVKG

SEQ ID NO: 935 - protein, 17 aa, Artificial Sequence
  source: /note="Description of Artificial Sequence: Synthetic peptide"
AISGSGGSTYYADSVKG

SEQ ID NO: 936 - protein, 17 aa, Artificial Sequence
  source: /note="Description of Artificial Sequence: Synthetic peptide"
AISGSGGSTYYADSVKG

SEQ ID NO: 937 - protein, 17 aa, Artificial Sequence
  source: /note="Description of Artificial Sequence: Synthetic peptide"
AISGSGGSTYYADSVKG

SEQ ID NO: 938 - protein, 17 aa, Artificial Sequence
  source: /note="Description of Artificial Sequence: Synthetic peptide"
AISGSGGSTYYADSVKG

SEQ ID NO: 939 - protein, 17 aa, Artificial Sequence
  source: /note="Description of Artificial Sequence: Synthetic peptide"
AISGSGGSTYYADSVKG

SEQ ID NO: 940 - protein, 17 aa, Artificial Sequence
  source: /note="Description of Artificial Sequence: Synthetic peptide"
WINTYTGESYFADDFKG

SEQ ID NO: 941 - protein, 17 aa, Artificial Sequence
  source: /note="Description of Artificial Sequence: Synthetic peptide"
WINTETREPAYAYDFRG

SEQ ID NO: 942 - protein, 17 aa, Artificial Sequence
  source: /note="Description of Artificial Sequence: Synthetic peptide"
RINTESGVPIYADDFKG

SEQ ID NO: 943 - protein, 17 aa, Artificial Sequence
  source: /note="Description of Artificial Sequence: Synthetic peptide"
RINTETGEPLYADDFKG

SEQ ID NO: 944 - protein, 11 aa, Artificial Sequence
  source: /note="Description of Artificial Sequence: Synthetic peptide"
SPAHYYGGMDV

SEQ ID NO: 945 - protein, 6 aa, Artificial Sequence
  source: /note="Description of Artificial Sequence: Synthetic peptide"
HSFLAY

SEQ ID NO: 946 - protein, 7 aa, Artificial Sequence
  source: /note="Description of Artificial Sequence: Synthetic peptide"
HGGESDV

SEQ ID NO: 947 - protein, 11 aa, Artificial Sequence
  source: /note="Description of Artificial Sequence: Synthetic peptide"
GPYYYQSYMDV

SEQ ID NO: 948 - protein, 14 aa, Artificial Sequence
  source: /note="Description of Artificial Sequence: Synthetic peptide"
LDSSGYYYARGPRY

SEQ ID NO: 949 - protein, 9 aa, Artificial Sequence
  source: /note="Description of Artificial Sequence: Synthetic peptide"
GPYYYYMDV

SEQ ID NO: 950 - protein, 7 aa, Artificial Sequence
  source: /note="Description of Artificial Sequence: Synthetic peptide"
HGGESDV

SEQ ID NO: 951 - protein, 7 aa, Artificial Sequence
  source: /note="Description of Artificial Sequence: Synthetic peptide"
HGGESDV

SEQ ID NO: 952 - protein, 7 aa, Artificial Sequence
  source: /note="Description of Artificial Sequence: Synthetic peptide"
HGGESDV

SEQ ID NO: 953 - protein, 8 aa, Artificial Sequence
  source: /note="Description of Artificial Sequence: Synthetic peptide"
ESGDGMDV

SEQ ID NO: 954 - protein, 7 aa, Artificial Sequence
  source: /note="Description of Artificial Sequence: Synthetic peptide"
HGGESDV

SEQ ID NO: 955 - protein, 8 aa, Artificial Sequence
  source: /note="Description of Artificial Sequence: Synthetic peptide"
STMVREDY

SEQ ID NO: 956 - protein, 7 aa, Artificial Sequence
  source: /note="Description of Artificial Sequence: Synthetic peptide"
HGGESDV

SEQ ID NO: 957 - protein, 7 aa, Artificial Sequence
  source: /note="Description of Artificial Sequence: Synthetic peptide"
HGGESDV

SEQ ID NO: 958 - protein, 7 aa, Artificial Sequence
  source: /note="Description of Artificial Sequence: Synthetic peptide"
HGGESDV

SEQ ID NO: 959 - protein, 11 aa, Artificial Sequence
  source: /note="Description of Artificial Sequence: Synthetic peptide"
HWQEWPDAFDI

SEQ ID NO: 960 - protein, 13 aa, Artificial Sequence
  source: /note="Description of Artificial Sequence: Synthetic peptide"
SGAGGTSATAFDI

SEQ ID NO: 961 - protein, 10 aa, Artificial Sequence
  source: /note="Description of Artificial Sequence: Synthetic peptide"
TIAAVYAFDI

SEQ ID NO: 962 - protein, 8 aa, Artificial Sequence
  source: /note="Description of Artificial Sequence: Synthetic peptide"
DLRGAFDI

SEQ ID NO: 963 - protein, 11 aa, Artificial Sequence
  source: /note="Description of Artificial Sequence: Synthetic peptide"
EGSGSGWYFDF

SEQ ID NO: 964 - protein, 13 aa, Artificial Sequence
  source: /note="Description of Artificial Sequence: Synthetic peptide"
AGIAARLRGAFDI

SEQ ID NO: 965 - protein, 20 aa, Artificial Sequence
  source: /note="Description of Artificial Sequence: Synthetic peptide"
RGGYQLLRWDVGLLRSAFDI

SEQ ID NO: 966 - protein, 13 aa, Artificial Sequence
  source: /note="Description of Artificial Sequence: Synthetic peptide"
SSPEGLFLYWFDP

SEQ ID NO: 967 - protein, 9 aa, Artificial Sequence
  source: /note="Description of Artificial Sequence: Synthetic peptide"
VEGSGSLDY

SEQ ID NO: 968 - protein, 9 aa, Artificial Sequence
  source: /note="Description of Artificial Sequence: Synthetic peptide"
RAGSEASDI

SEQ ID NO: 969 - protein, 15 aa, Artificial Sequence
  source: /note="Description of Artificial Sequence: Synthetic peptide"
ATYKRELRYYYGMDV

SEQ ID NO: 970 - protein, 15 aa, Artificial Sequence
  source: /note="Description of Artificial Sequence: Synthetic peptide"
ATYKRELRYYYGMDV

SEQ ID NO: 971 - protein, 8 aa, Artificial Sequence
  source: /note="Description of Artificial Sequence: Synthetic peptide"
VGKAVPDV

SEQ ID NO: 972 - protein, 13 aa, Artificial Sequence
  source: /note="Description of Artificial Sequence: Synthetic peptide"
HQGVAYYNYAMDV

SEQ ID NO: 973 - protein, 8 aa, Artificial Sequence
  source: /note="Description of Artificial Sequence: Synthetic peptide"
VVRDGMDV

SEQ ID NO: 974 - protein, 9 aa, Artificial Sequence
  source: /note="Description of Artificial Sequence: Synthetic peptide"
IPQTGTFDY

SEQ ID NO: 975 - protein, 15 aa, Artificial Sequence
  source: /note="Description of Artificial Sequence: Synthetic peptide"
ANYKRELRYYYGMDV

SEQ ID NO: 976 - protein, 11 aa, Artificial Sequence
  source: /note="Description of Artificial Sequence: Synthetic peptide"
ALVGATGAFDI

SEQ ID NO: 977 - protein, 8 aa, Artificial Sequence
  source: /note="Description of Artificial Sequence: Synthetic peptide"
WFGEGFDP

SEQ ID NO: 978 - protein, 17 aa, Artificial Sequence
  source: /note="Description of Artificial Sequence: Synthetic peptide"
VGYDSSGYYRDYYGMDV

SEQ ID NO: 979 - protein, 13 aa, Artificial Sequence
  source: /note="Description of Artificial Sequence: Synthetic peptide"
MGWSSGYLGAFDI

SEQ ID NO: 980 - protein, 13 aa, Artificial Sequence
  source: /note="Description of Artificial Sequence: Synthetic peptide"
GEIYYGYDGGFAY

SEQ ID NO: 981 - protein, 8 aa, Artificial Sequence
  source: /note="Description of Artificial Sequence: Synthetic peptide"
DYSYAMDY

SEQ ID NO: 982 - protein, 8 aa, Artificial Sequence
  source: /note="Description of Artificial Sequence: Synthetic peptide"
DYLYSLDF

SEQ ID NO: 983 - protein, 8 aa, Artificial Sequence
  source: /note="Description of Artificial Sequence: Synthetic peptide"
DYLYSCDY

SEQ ID NO: 984 - protein, 12 aa, Artificial Sequence
  source: /note="Description of Artificial Sequence: Synthetic peptide"
RASQSISSSFLA

SEQ ID NO: 985 - protein, 16 aa, Artificial Sequence
  source: /note="Description of Artificial Sequence: Synthetic peptide"
RSSQSLLHSNGYNYLD

SEQ ID NO: 986 - protein, 16 aa, Artificial Sequence
  source: /note="Description of Artificial Sequence: Synthetic peptide"
KSSQSLLRNDGKTPLY

SEQ ID NO: 987 - protein, 16 aa, Artificial Sequence
  source: /note="Description of Artificial Sequence: Synthetic peptide"
RSSQSLLHSNGYNYLN

SEQ ID NO: 988 - protein, 11 aa, Artificial Sequence
  source: /note="Description of Artificial Sequence: Synthetic peptide"
RASQSISSYLN

SEQ ID NO: 989 - protein, 16 aa, Artificial Sequence
  source: /note="Description of Artificial Sequence: Synthetic peptide"
RSSQSLLYSNGYNYVD

SEQ ID NO: 990 - protein, 11 aa, Artificial Sequence
  source: /note="Description of Artificial Sequence: Synthetic peptide"
RASQSVSSNLA

SEQ ID NO: 991 - protein, 11 aa, Artificial Sequence
  source: /note="Description of Artificial Sequence: Synthetic peptide"
RASQSVSSKLA

SEQ ID NO: 992 - protein, 12 aa, Artificial Sequence
  source: /note="Description of Artificial Sequence: Synthetic peptide"
RASQSVGSTNLA

SEQ ID NO: 993 - protein, 11 aa, Artificial Sequence
  source: /note="Description of Artificial Sequence: Synthetic peptide"
RASQSISSYLN

SEQ ID NO: 994 - protein, 11 aa, Artificial Sequence
  source: /note="Description of Artificial Sequence: Synthetic peptide"
RASQSISSYLN

SEQ ID NO: 995 - protein, 16 aa, Artificial Sequence
  source: /note="Description of Artificial Sequence: Synthetic peptide"
KSSESLVHNSGKTYLN

SEQ ID NO: 996 - protein, 11 aa, Artificial Sequence
  source: /note="Description of Artificial Sequence: Synthetic peptide"
QASEDINKFLN

SEQ ID NO: 997 - protein, 11 aa, Artificial Sequence
  source: /note="Description of Artificial Sequence: Synthetic peptide"
RASQSVGSNLA

SEQ ID NO: 998 - protein, 12 aa, Artificial Sequence
  source: /note="Description of Artificial Sequence: Synthetic peptide"
RASQSIGSSSLA

SEQ ID NO: 999 - protein, 11 aa, Artificial Sequence
  source: /note="Description of Artificial Sequence: Synthetic peptide"
KASQDIDDAMN

SEQ ID NO: 1000 - protein, 11 aa, Artificial Sequence
  source: /note="Description of Artificial Sequence: Synthetic peptide"
RASQDIYNNLA

SEQ ID NO: 1001 - protein, 16 aa, Artificial Sequence
  source: /note="Description of Artificial Sequence: Synthetic peptide"
RSSQSLLHSNGYNYLD

SEQ ID NO: 1002 - protein, 11 aa, Artificial Sequence
  source: /note="Description of Artificial Sequence: Synthetic peptide"
GGNNIGTKSVH

SEQ ID NO: 1003 - protein, 11 aa, Artificial Sequence
  source: /note="Description of Artificial Sequence: Synthetic peptide"
SGDGLSKKYVS

SEQ ID NO: 1004 - protein, 11 aa, Artificial Sequence
  source: /note="Description of Artificial Sequence: Synthetic peptide"
RASQGIRNWLA

SEQ ID NO: 1005 - protein, 11 aa, Artificial Sequence
  source: /note="Description of Artificial Sequence: Synthetic peptide"
GGNNIGSKSVH

SEQ ID NO: 1006 - protein, 11 aa, Artificial Sequence
  source: /note="Description of Artificial Sequence: Synthetic peptide"
QGDSLGNYYAT

SEQ ID NO: 1007 - protein, 12 aa, Artificial Sequence
  source: /note="Description of Artificial Sequence: Synthetic peptide"
RASQSVSSAYLA

SEQ ID NO: 1008 - protein, 11 aa, Artificial Sequence
  source: /note="Description of Artificial Sequence: Synthetic peptide"
RASQSVSNSLA

SEQ ID NO: 1009 - protein, 12 aa, Artificial Sequence
  source: /note="Description of Artificial Sequence: Synthetic peptide"
RASQSVSSSFLA

SEQ ID NO: 1010 - protein, 12 aa, Artificial Sequence
  source: /note="Description of Artificial Sequence: Synthetic peptide"
RASQSVSTTFLA

SEQ ID NO: 1011 - protein, 11 aa, Artificial Sequence
  source: /note="Description of Artificial Sequence: Synthetic peptide"
RASQSISSYLN

SEQ ID NO: 1012 - protein, 12 aa, Artificial Sequence
  source: /note="Description of Artificial Sequence: Synthetic peptide"
RATQSIGSSFLA

SEQ ID NO: 1013 - protein, 12 aa, Artificial Sequence
  source: /note="Description of Artificial Sequence: Synthetic peptide"
RASQSVSSSYLA

SEQ ID NO: 1014 - protein, 12 aa, Artificial Sequence
  source: /note="Description of Artificial Sequence: Synthetic peptide"
RASQSVSSSYLA

SEQ ID NO: 1015 - protein, 12 aa, Artificial Sequence
  source: /note="Description of Artificial Sequence: Synthetic peptide"
RASQRVASNYLA

SEQ ID NO: 1016 - protein, 12 aa, Artificial Sequence
  source: /note="Description of Artificial Sequence: Synthetic peptide"
RASQSLSSNFLA

SEQ ID NO: 1017 - protein, 16 aa, Artificial Sequence
  source: /note="Description of Artificial Sequence: Synthetic peptide"
RSSQSLLHSNGYNYLD

SEQ ID NO: 1018 - protein, 12 aa, Artificial Sequence
  source: /note="Description of Artificial Sequence: Synthetic peptide"
RASQSVSSSYLA

SEQ ID NO: 1019 - protein, 12 aa, Artificial Sequence
  source: /note="Description of Artificial Sequence: Synthetic peptide"
RASQSVASSFLA

SEQ ID NO: 1020 - protein, 11 aa, Artificial Sequence
  source: /note="Description of Artificial Sequence: Synthetic peptide"
RASQDVNTAVS

SEQ ID NO: 1021 - protein, 15 aa, Artificial Sequence
  source: /note="Description of Artificial Sequence: Synthetic peptide"
RASESVSVIGAHLIH

SEQ ID NO: 1022 - protein, 15 aa, Artificial Sequence
  source: /note="Description of Artificial Sequence: Synthetic peptide"
RASESVTILGSHLIY

SEQ ID NO: 1023 - protein, 15 aa, Artificial Sequence
  source: /note="Description of Artificial Sequence: Synthetic peptide"
RASESVTILGSHLIY

SEQ ID NO: 1024 - protein, 7 aa, Artificial Sequence
  source: /note="Description of Artificial Sequence: Synthetic peptide"
GASRRAT

SEQ ID NO: 1025 - protein, 7 aa, Artificial Sequence
  source: /note="Description of Artificial Sequence: Synthetic peptide"
LGSNRAS

SEQ ID NO: 1026 - protein, 7 aa, Artificial Sequence
  source: /note="Description of Artificial Sequence: Synthetic peptide"
EVSNRFS

SEQ ID NO: 1027 - protein, 7 aa, Artificial Sequence
  source: /note="Description of Artificial Sequence: Synthetic peptide"
LGSKRAS

SEQ ID NO: 1028 - protein, 7 aa, Artificial Sequence
  source: /note="Description of Artificial Sequence: Synthetic peptide"
GASTLAS

SEQ ID NO: 1029 - protein, 7 aa, Artificial Sequence
  source: /note="Description of Artificial Sequence: Synthetic peptide"
LGSNRAS

SEQ ID NO: 1030 - protein, 7 aa, Artificial Sequence
  source: /note="Description of Artificial Sequence: Synthetic peptide"
GASTRAS

SEQ ID NO: 1031 - protein, 7 aa, Artificial Sequence
  source: /note="Description of Artificial Sequence: Synthetic peptide"
GASIRAT

SEQ ID NO: 1032 - protein, 7 aa, Artificial Sequence
  source: /note="Description of Artificial Sequence: Synthetic peptide"
DASNRAT

SEQ ID NO: 1033 - protein, 7 aa, Artificial Sequence
  source: /note="Description of Artificial Sequence: Synthetic peptide"
AASSLQS

SEQ ID NO: 1034 - protein, 7 aa, Artificial Sequence
  source: /note="Description of Artificial Sequence: Synthetic peptide"
AASSLQS

SEQ ID NO: 1035 - protein, 7 aa, Artificial Sequence
  source: /note="Description of Artificial Sequence: Synthetic peptide"
EVSNRDS

SEQ ID NO: 1036 - protein, 7 aa, Artificial Sequence
  source: /note="Description of Artificial Sequence: Synthetic peptide"
DASTLQT

SEQ ID NO: 1037 - protein, 7 aa, Artificial Sequence
  source: /note="Description of Artificial Sequence: Synthetic peptide"
GASTRAT

SEQ ID NO: 1038 - protein, 7 aa, Artificial Sequence
  source: /note="Description of Artificial Sequence: Synthetic peptide"
GASSRAS

SEQ ID NO: 1039 - protein, 7 aa, Artificial Sequence
  source: /note="Description of Artificial Sequence: Synthetic peptide"
SATSPVP

SEQ ID NO: 1040 - protein, 7 aa, Artificial Sequence
  source: /note="Description of Artificial Sequence: Synthetic peptide"
AANKSQS

SEQ ID NO: 1041 - protein, 7 aa, Artificial Sequence
  source: /note="Description of Artificial Sequence: Synthetic peptide"
LGSNRAS

SEQ ID NO: 1042 - protein, 7 aa, Artificial Sequence
  source: /note="Description of Artificial Sequence: Synthetic peptide"
DDSVRPS

SEQ ID NO: 1043 - protein, 7 aa, Artificial Sequence
  source: /note="Description of Artificial Sequence: Synthetic peptide"
RDKERPS

SEQ ID NO: 1044 - protein, 7 aa, Artificial Sequence
  source: /note="Description of Artificial Sequence: Synthetic peptide"
AASNLQS

SEQ ID NO: 1045 - protein, 7 aa, Artificial Sequence
  source: /note="Description of Artificial Sequence: Synthetic peptide"
GKNNRPS

SEQ ID NO: 1046 - protein, 7 aa, Artificial Sequence
  source: /note="Description of Artificial Sequence: Synthetic peptide"
GTNNRPS

SEQ ID NO: 1047 - protein, 7 aa, Artificial Sequence
  source: /note="Description of Artificial Sequence: Synthetic peptide"
GASTRAT

SEQ ID NO: 1048 - protein, 7 aa, Artificial Sequence
  source: /note="Description of Artificial Sequence: Synthetic peptide"
DASSRAT

SEQ ID NO: 1049 - protein, 7 aa, Artificial Sequence
  source: /note="Description of Artificial Sequence: Synthetic peptide"
GASSRAT

SEQ ID NO: 1050 - protein, 7 aa, Artificial Sequence
  source: /note="Description of Artificial Sequence: Synthetic peptide"
GSSNRAT

SEQ ID NO: 1051 - protein, 7 aa, Artificial Sequence
  source: /note="Description of Artificial Sequence: Synthetic peptide"
AASSLQS

SEQ ID NO: 1052 - protein, 7 aa, Artificial Sequence
  source: /note="Description of Artificial Sequence: Synthetic peptide"
GASQRAT

SEQ ID NO: 1053 - protein, 7 aa, Artificial Sequence
  source: /note="Description of Artificial Sequence: Synthetic peptide"
GASSRAT

SEQ ID NO: 1054 - protein, 7 aa, Artificial Sequence
  source: /note="Description of Artificial Sequence: Synthetic peptide"
GASSRAT

SEQ ID NO: 1055 - protein, 7 aa, Artificial Sequence
  source: /note="Description of Artificial Sequence: Synthetic peptide"
GASSRAT

SEQ ID NO: 1056 - protein, 7 aa, Artificial Sequence
  source: /note="Description of Artificial Sequence: Synthetic peptide"
GASNWAT

SEQ ID NO: 1057 - protein, 7 aa, Artificial Sequence
  source: /note="Description of Artificial Sequence: Synthetic peptide"
LGSNRAS

SEQ ID NO: 1058 - protein, 7 aa, Artificial Sequence
  source: /note="Description of Artificial Sequence: Synthetic peptide"
GTSSRAT

SEQ ID NO: 1059 - protein, 7 aa, Artificial Sequence
  source: /note="Description of Artificial Sequence: Synthetic peptide"
GASGRAT

SEQ ID NO: 1060 - protein, 7 aa, Artificial Sequence
  source: /note="Description of Artificial Sequence: Synthetic peptide"
SASYRYT

SEQ ID NO: 1061 - protein, 7 aa, Artificial Sequence
  source: /note="Description of Artificial Sequence: Synthetic peptide"
LASNLET

SEQ ID NO: 1062 - protein, 7 aa, Artificial Sequence
  source: /note="Description of Artificial Sequence: Synthetic peptide"
LASNVQT

SEQ ID NO: 1063 - protein, 7 aa, Artificial Sequence
  source: /note="Description of Artificial Sequence: Synthetic peptide"
LASNVQT

SEQ ID NO: 1064 - protein, 10 aa, Artificial Sequence
  source: /note="Description of Artificial Sequence: Synthetic peptide"
QQYHSSPSWT

SEQ ID NO: 1065 - protein, 9 aa, Artificial Sequence
  source: /note="Description of Artificial Sequence: Synthetic peptide"
MQALQTPYT

SEQ ID NO: 1066 - protein, 8 aa, Artificial Sequence
  source: /note="Description of Artificial Sequence: Synthetic peptide"
MQNIQFPS

SEQ ID NO: 1067 - protein, 9 aa, Artificial Sequence
  source: /note="Description of Artificial Sequence: Synthetic peptide"
MQALQTPYT

SEQ ID NO: 1068 - protein, 8 aa, Artificial Sequence
  source: /note="Description of Artificial Sequence: Synthetic peptide"
QQSYKRAS

SEQ ID NO: 1069 - protein, 9 aa, Artificial Sequence
  source: /note="Description of Artificial Sequence: Synthetic peptide"
MQGRQFPYS

SEQ ID NO: 1070 - protein, 8 aa, Artificial Sequence
  source: /note="Description of Artificial Sequence: Synthetic peptide"
QQYGSSLT

SEQ ID NO: 1071 - protein, 9 aa, Artificial Sequence
  source: /note="Description of Artificial Sequence: Synthetic peptide"
QQYGSSSWT

SEQ ID NO: 1072 - protein, 10 aa, Artificial Sequence
  source: /note="Description of Artificial Sequence: Synthetic peptide"
QQYGSSPPWT

SEQ ID NO: 1073 - protein, 7 aa, Artificial Sequence
  source: /note="Description of Artificial Sequence: Synthetic peptide"
QQSYTLA

SEQ ID NO: 1074 - protein, 9 aa, Artificial Sequence
  source: /note="Description of Artificial Sequence: Synthetic peptide"
QQSYSTPYT

SEQ ID NO: 1075 - protein, 9 aa, Artificial Sequence
  source: /note="Description of Artificial Sequence: Synthetic peptide"
MQGTHWPGT

SEQ ID NO: 1076 - protein, 9 aa, Artificial Sequence
  source: /note="Description of Artificial Sequence: Synthetic peptide"
QQYESLPLT

SEQ ID NO: 1077 - protein, 10 aa, Artificial Sequence
  source: /note="Description of Artificial Sequence: Synthetic peptide"
QQYNDWLPVT

SEQ ID NO: 1078 - protein, 10 aa, Artificial Sequence
  source: /note="Description of Artificial Sequence: Synthetic peptide"
QQYAGSPPFT

SEQ ID NO: 1079 - protein, 9 aa, Artificial Sequence
  source: /note="Description of Artificial Sequence: Synthetic peptide"
LQHDNFPLT

SEQ ID NO: 1080 - protein, 9 aa, Artificial Sequence
  source: /note="Description of Artificial Sequence: Synthetic peptide"
QHYYRFPYS

SEQ ID NO: 1081 - protein, 9 aa, Artificial Sequence
  source: /note="Description of Artificial Sequence: Synthetic peptide"
MQALQTPYT

SEQ ID NO: 1082 - protein, 11 aa, Artificial Sequence
  source: /note="Description of Artificial Sequence: Synthetic peptide"
QVWDSDSEHVV

SEQ ID NO: 1083 - protein, 9 aa, Artificial Sequence
  source: /note="Description of Artificial Sequence: Synthetic peptide"
QAWDDTTVV

SEQ ID NO: 1084 - protein, 9 aa, Artificial Sequence
  source: /note="Description of Artificial Sequence: Synthetic peptide"
QKYNSAPFT

SEQ ID NO: 1085 - protein, 12 aa, Artificial Sequence
  source: /note="Description of Artificial Sequence: Synthetic peptide"
SSRDSSGDHLRV

SEQ ID NO: 1086 - protein, 11 aa, Artificial Sequence
  source: /note="Description of Artificial Sequence: Synthetic peptide"
NSRDSSGHHLL

SEQ ID NO: 1087 - protein, 14 aa, Artificial Sequence
  source: /note="Description of Artificial Sequence: Synthetic peptide"
QHYGSSFNGSSLFT

SEQ ID NO: 1088 - protein, 10 aa, Artificial Sequence
  source: /note="Description of Artificial Sequence: Synthetic peptide"
QQFGTSSGLT

SEQ ID NO: 1089 - protein, 10 aa, Artificial Sequence
  source: /note="Description of Artificial Sequence: Synthetic peptide"
QQYHSSPSWT

SEQ ID NO: 1090 - protein, 10 aa, Artificial Sequence
  source: /note="Description of Artificial Sequence: Synthetic peptide"
QQYHSSPSWT

SEQ ID NO: 1091 - protein, 9 aa, Artificial Sequence
  source: /note="Description of Artificial Sequence: Synthetic peptide"
QQSYSTPYS

SEQ ID NO: 1092 - protein, 10 aa, Artificial Sequence
  source: /note="Description of Artificial Sequence: Synthetic peptide"
QHYESSPSWT

SEQ ID NO: 1093 - protein, 10 aa, Artificial Sequence
  source: /note="Description of Artificial Sequence: Synthetic peptide"
QQYGSPPRFT

SEQ ID NO: 1094 - protein, 10 aa, Artificial Sequence
  source: /note="Description of Artificial Sequence: Synthetic peptide"
QHYGSSPSWT

SEQ ID NO: 1095 - protein, 10 aa, Artificial Sequence
  source: /note="Description of Artificial Sequence: Synthetic peptide"
QHYDSSPSWT

SEQ ID NO: 1096 - protein, 10 aa, Artificial Sequence
  source: /note="Description of Artificial Sequence: Synthetic peptide"
QYYGTSPMYT

SEQ ID NO: 1097 - protein, 9 aa, Artificial Sequence
  source: /note="Description of Artificial Sequence: Synthetic peptide"
MQALQTPLT

SEQ ID NO: 1098 - protein, 11 aa, Artificial Sequence
  source: /note="Description of Artificial Sequence: Synthetic peptide"
QHYGNSPPKFT

SEQ ID NO: 1099 - protein, 10 aa, Artificial Sequence
  source: /note="Description of Artificial Sequence: Synthetic peptide"
QHYGGSPRLT

SEQ ID NO: 1100 - protein, 9 aa, Artificial Sequence
  source: /note="Description of Artificial Sequence: Synthetic peptide"
QQHYSTPWT

SEQ ID NO: 1101 - protein, 9 aa, Artificial Sequence
  source: /note="Description of Artificial Sequence: Synthetic peptide"
LQSRIFPRT

SEQ ID NO: 1102 - protein, 9 aa, Artificial Sequence
  source: /note="Description of Artificial Sequence: Synthetic peptide"
LQSRTIPRT

SEQ ID NO: 1103 - protein, 9 aa, Artificial Sequence
  source: /note="Description of Artificial Sequence: Synthetic peptide"
LQSRTIPRT

1. An isolated nucleic acid molecule encoding a chimeric antigen receptor (CAR), wherein the CAR comprises an anti-BCMA binding domain, a transmembrane domain, and an intracellular signaling domain, and wherein said anti-BCMA binding domain comprises:
(i) a heavy chain complementary determining region 1 (HC CDR1), a heavy chain complementary determining region 2 (HC CDR2), and a heavy chain complementary determining region 3 (HC CDR3) of any anti-BMCA heavy chain binding domain amino acid sequences listed in Table 1 or 16; and
(ii) a light chain complementary determining region 1 (LC CDR1), a light chain complementary determining region 2 (LC CDR2), and a light chain complementary determining region 3 (LC CDR3) of any anti-BMCA light chain binding domain amino acid sequences listed in Table 1 or 16.

2. (canceled)

3. The isolated nucleic acid molecule of claim 1, wherein said LC CDR1, LC CDR2, and LC CDR3 are the LC CDR sequences listed in Table 21, 23, or 25.

4. The isolated nucleic acid molecule of claim 1, wherein said HC CDR1, HC CDR2, and HC CDR3 are the HC CDR sequences listed in Table 20, 22, or 24.

5. The isolated nucleic acid molecule of claim 1, which encodes a CAR comprising:
(i) the amino acid sequence of any light chain variable region listed in Table 1;
(ii) an amino acid sequence having at least one, two or three modifications but not more than 30, 20 or 10 modifications of the amino acid sequence of any of the light chain variable regions provided in Table 1; or
(iii) an amino acid sequence with 95-99% identity to the amino acid sequence of any of the light chain variable regions provided in Table 1.

6. The isolated nucleic acid molecule of claim 1, which encodes a CAR comprising:
(i) the amino acid sequence of any heavy chain variable region listed in Table 1;
(ii) an amino acid sequence having at least one, two or three modifications but not more than 30, 20 or 10 modifications of the amino acid sequence of any of the heavy chain variable regions provided in Table 1: or
(iii) an amino acid sequence with 95-99% identity to the amino acid sequence of any of the heavy chain variable regions provided in Table 1.

7. The isolated nucleic acid molecule of claim 1, which encodes a CAR comprising the amino acid sequence of any light chain variable region listed in Table 1, and the amino acid sequence of any heavy chain variable region listed in Table 1.

8. The isolated nucleic acid molecule of claim 1, wherein the encoded anti-BCMA binding domain comprises:
(i) the amino acid sequence selected from a group consisting of SEQ ID NO: 49, 39-53, 69-83, 84-98, 129-149, 171-191, 192-212, 255-258, 259-262, 263-266, 271, and 273;
(ii) an amino acid sequence having at least one, two or three modifications but not more than 30, 20 or 10 modifications to any of SEQ ID NO: 49, 39-53, 69-83, 84-98, 129-149, 171-191, 192-212, 255-258, 259-262, 263-266, 271, or 273; or
(iii) an amino acid sequence with 95-99% identity to any of SEQ ID NO: 49, 39-53, 69-83, 84-98, 129-149, 171-191, 192-212, 255-258, 259-262, 263-266, 271, or 273.

9. The isolated nucleic acid molecule of claim 1, wherein the anti-BCMA binding domain comprises a nucleotide sequence selected from a group consisting of SEQ ID NO: 64, 54-68, 150-170, 272, and 274, or a sequence with 95-99% identity thereof.

10. The isolated nucleic acid molecule of claim 1, wherein:
(i) the encoded CAR comprises a transmembrane domain that comprises a transmembrane domain of a protein selected from the group consisting of the alpha, beta or zeta chain of the T-cell receptor, CD28, CD3 epsilon, CD45, CD4, CDS, CD8, CD9, CD16, CD22, CD33, CD37, CD64, CD80, CD86, CD134, CD137 and CD154; or
(ii) the encoded transmembrane domain comprises the amino acid sequence of SEQ ID NO: 6, an amino acid sequence comprising at least one, two or three modifications but not more than 20, 10 or 5 modifications of the amino acid sequence of SEQ ID NO:6, or a sequence with 95-99% identity to the amino acid sequence of SEQ ID NO:6; or (ii) the nucleic acid sequence encoding the transmembrane domain comprises the nucleotide sequence of SEQ ID NO:17, or the nucleotide sequence with 95-99% identity thereof.

11. The isolated nucleic acid molecule of claim 1, wherein the encoded anti-BCMA binding domain comprises:
(i) the amino acid sequence of SEQ ID NO: 49;
(ii) an amino acid sequence having at least one, two or three modifications but not more than 30, 20 or 10 modifications to SEQ ID NO: 49; or
(iii) an amino acid sequence with 95-99% identity to SEQ ID NO: 49.

12. The isolated nucleic acid molecule of claim 1, wherein the encoded anti-BCMA binding domain is connected to the transmembrane domain by a hinge region, wherein (i) the encoded hinge region comprises the amino acid sequence of SEQ ID NO:2, or a sequence with 95-99% identity thereof; or (ii) the nucleic acid sequence encoding the hinge region comprises the nucleotide sequence of SEQ ID NO: 13, or a sequence with 95-99% identity thereof.

13. (canceled)

14. The isolated nucleic acid molecule of claim 1, wherein the encoded intracellular domain comprises a costimulatory domain, wherein the costimulatory domain comprises a functional signaling domain derived from a protein selected from the group consisting of MHC class I molecules, TNF receptor proteins, Immunoglobulin-like proteins, cytokine receptors, integrins, signaling lymphocytic activation molecules (SLAM proteins), activating NK cell receptors, BTLA, a Toll ligand receptor, OX40, CD2, CD7, CD27, CD28, CD30, CD40, CDS, ICAM-1, LFA-1 (CD11a/CD18), 4-1BB (CD137), B7-H3, CDS, ICAM-1, ICOS (CD278), GITR, BAFFR, LIGHT, HVEM (LIGHTR), KIRDS2, SLAMF7, NKp80 (KLRF1), NKp44, NKp30, NKp46, CD19, CD4, CD8alpha, CD8beta, IL2R beta, IL2R gamma, IL7R alpha, ITGA4, VLA1, CD49a, ITGA4, IA4, CD49D, ITGA6, VLA-6, CD49f, ITGAD, CD11d, ITGAE, CD103, ITGAL, CD11a, LFA-1, ITGAM, CD11b, ITGAX, CD11c, ITGB1, CD29, ITGB2, CD18, LFA-1, ITGB7, NKG2D, NKG2C, TNFR2, TRANCE/RANKL, DNAM1 (CD226), SLAMF4 (CD244, 2B4), CD84, CD96 (Tactile), CEACAM1, CRTAM, Ly9 (CD229), CD160 (BY55), PSGL1, CD100 (SEMA4D), CD69, SLAMF6 (NTB-A, Ly108), SLAM (SLAMF1, CD150, IPO-3), BLAME (SLAMF8), SELPLG (CD162), LTBR, LAT, GADS, SLP-76, PAG/Cbp, CD19a, and a ligand that specifically binds with CD83.

15. The isolated nucleic acid molecule of claim 14, wherein the encoded costimulatory domain comprises the amino acid sequence of SEQ ID NO:7, or an amino acid sequence having at least one, two or three modifications but not more than 20, 10 or 5 modifications of the amino acid sequence of SEQ ID NO:7, or a sequence with 95-99% identity to the amino acid sequence of SEQ ID NO:7.

16. The isolated nucleic acid molecule of claim 14, wherein the nucleic acid sequence encoding the costimulatory domain comprises the nucleotide sequence of SEQ ID NO:18, or a sequence with 95-99% identity thereof.

17. The isolated nucleic acid molecule of claim 1, wherein the encoded intracellular signaling domain comprises a functional signaling domain of 4-1BB and a functional signaling domain of CD3 zeta.

18. The isolated nucleic acid molecule of claim 1, wherein the encoded intracellular signaling domain comprises the amino acid sequence of SEQ ID NO: 7 and the sequence of SEQ ID NO:9 or SEQ ID NO:10; or an amino acid sequence having at least one, two or three modifications but not more than 20, 10 or 5 modifications of the amino acid sequence of SEQ ID NO:7 and the amino acid sequence of SEQ ID NO:9 or SEQ ID NO:10, or a sequence with 95-99% identity to the amino acid sequence of SEQ ID NO:7 and the amino acid sequence of SEQ ID NO:9 or SEQ ID NO:10.

19. The isolated nucleic acid molecule of claim 1, wherein the encoded intracellular signaling domain comprises the sequence of SEQ ID NO:7 and the sequence of SEQ ID NO:9 or SEQ ID NO:10, wherein the sequences comprising the intracellular signaling domain are expressed in the same frame and as a single polypeptide chain.

20. The isolated nucleic acid molecule of claim 1, wherein the nucleic acid sequence encoding the intracellular signaling domain comprises the sequence of SEQ ID NO:18, or a sequence with 95-99% identity thereof, and/or the sequence of SEQ ID NO:20 or SEQ ID NO:21, or a sequence with 95-99% identity thereof.

21. The isolated nucleic acid molecule of claim 1, further comprising a leader sequence which encodes the amino acid sequence of SEQ ID NO: 1.

22. The isolated nucleic acid molecule of claim 1, which encodes a CAR comprising:
(i) the amino acid sequence of any of SEQ ID NOs: 109, 99-113, 213-233, or 267-270;
(ii) an amino acid sequence having at least one, two or three modifications but not more than 30, 20 or 10 modifications to any of SEQ ID NOs: 109, 99-113, 213-233, or 267-270; or
(iii) an amino acid sequence with 95-99% identity to any of SEQ ID NOs: 109, 99-113, 213-233, or 267-270.

23. The isolated nucleic acid molecule of claim 1, comprising the nucleotide sequence of any of SEQ ID NOs: 124, 114-128 or 234-254, or a nucleotide sequence with 95-99% identity to any of SEQ ID NOs: 124, 114-128 or 234-254.

24. (canceled)

25. An isolated chimeric antigen receptor (CAR) polypeptide, wherein the CAR comprises an anti-BCMA binding domain, a transmembrane domain, and an intracellular signaling domain, and wherein said anti-BCMA binding domain comprises:
(i) a heavy chain complementary determining region 1 (HC CDR1), a heavy chain complementary determining region 2 (HC CDR2), and a heavy chain complementary determining region 3 (HC CDR3) of any anti-BCMA heavy chain binding domain amino acid sequences listed in Table 1 or 16; and
(ii) a light chain complementary determining region 1 (LC CDR1), a light chain complementary determining region 2 (LC CDR2), and a light chain complementary determining region 3 (LC CDR3) of any anti-BCMA light chain binding domain amino acid sequences listed in Table 1 or 16.

26. (canceled)

27. The isolated CAR polypeptide of claim 25, wherein:
(i) said LC CDR1, LC CDR2, and LC CDR3 are the LC CDR sequences listed in Table 21, 23, or 25;
(ii) said HC CDR1, HC CDR2 and HC CDR3 are the HC CDR sequences listed in Table 21, 23, or 25; or
(iii) both (i) and (ii).

28. (canceled)

29. The isolated CAR polypeptide of claim 25, comprising:
(i) the amino acid sequence of any light chain variable region listed in Table 1;
(ii) an amino acid sequence having at least one, two or three modifications but not more than 30, 20 or 10 modifications of the amino acid sequence of any of the light chain variable region provided in Table 1;
(iii) an amino acid sequence with 95-99% identity to the amino acid sequence of any of the light chain variable region provided in Table 1;
(iv) the amino acid sequence of any heavy chain variable region listed in Table 1;
(v) an amino acid sequence having at least one, two or three modifications but not more than 30, 20 or 10 modifications of the amino acid sequence of any of the heavy chain variable regions provided in Table 1; or
(vi) an amino acid sequence with 95-99% identity to the amino acid sequence of any of the heavy chain variable regions provided in Table 1; or
(vii) any of (i)-(iii) and any of (iv)-(vi).

30. (canceled)

31. The isolated CAR polypeptide of claim 25, comprising:
(i) the amino acid sequence of any light chain variable region listed in Table 1, and the amino acid sequence of any heavy chain variable region provided in Table 1;
(ii) an amino acid sequence selected from a group consisting of SEQ ID NO: 49, 39-53, 69-83, 84-98, 129-149, 171-191, 192-212, 255-258, 259-262, 263-266, 271, and 273;
(iii) an amino acid sequence having at least one, two or three modifications but not more than 30, 20 or 10 modifications to any of SEQ ID NO: 49, 39-53, 69-83, 84-98, 129-149, 171-191, 192-212, 255-258, 259-262, 263-266, 271, and 273; or
(iv) an amino acid sequence with 95-99% identity to any of SEQ ID NO: 49, 39-53, 69-83, 84-98, 129-149, 171-191, 192-212, 255-258, 259-262, 263-266, 271, and 273.

32. (canceled)

33. The isolated CAR polypeptide of claim 25, wherein the transmembrane domain comprises a transmembrane domain from a protein selected from the group consisting of the alpha, beta or zeta chain of the T-cell receptor, CD28, CD3 epsilon, CD45, CD4, CDS, CD8, CD9, CD16, CD22, CD33, CD37, CD64, CD80, CD86, CD134, CD137 and CD154.

34. The isolated CAR polypeptide of claim 25, wherein
(i) the transmembrane domain comprises the amino acid sequence of SEQ ID NO: 6;
(ii) an amino acid sequence comprises at least one, two or three modifications but not more than 20, 10 or 5 modifications of the amino acid sequence of SEQ ID NO: 6; or
(iii) a sequence with 95-99% identity to the amino acid sequence of SEQ ID NO: 6.

35. The isolated CAR polypeptide of claim 25, wherein the anti-BCMA binding domain is connected to the transmembrane domain by a hinge region, wherein the hinge region comprises SEQ ID NO:2 or SEQ ID NO:36, or a sequence with 95-99% identity thereof.

36. (canceled)

37. The isolated CAR polypeptide of claim 25, wherein the encoded intracellular domain comprises a costimulatory domain, wherein the costimulatory domain comprises a functional signaling domain derived from a protein selected from the group consisting of MHC class I molecules, TNF receptor proteins, Immunoglobulin-like proteins, cytokine receptors, integrins, signaling lymphocytic activation molecules (SLAM proteins), activating NK cell receptors, BTLA, a Toll ligand receptor, OX40, CD2, CD7, CD27, CD28, CD30, CD40, CDS, ICAM-1, LFA-1 (CD11a/CD18), 4-1BB (CD137), B7-H3, CDS, ICAM-1, ICOS (CD278), GITR, BAFFR, LIGHT, HVEM (LIGHTR), KIRDS2, SLAMF7, NKp80 (KLRF1), NKp44, NKp30, NKp46, CD19, CD4, CD8alpha, CD8beta, IL2R beta, IL2R gamma, IL7R alpha, ITGA4, VLA1, CD49a, ITGA4, IA4, CD49D, ITGA6, VLA-6, CD49f, ITGAD, CD11d, ITGAE, CD103, ITGAL, CD11a, LFA-1, ITGAM, CD11b, ITGAX, CD11c, ITGB1, CD29, ITGB2, CD18, LFA-1, ITGB7, NKG2D, NKG2C, TNFR2, TRANCE/RANKL, DNAM1 (CD226), SLAMF4 (CD244, 2B4), CD84, CD96 (Tactile), CEACAM1, CRTAM, Ly9 (CD229), CD160 (BY55), PSGL1, CD100 (SEMA4D), CD69, SLAMF6 (NTB-A, Ly108), SLAM (SLAMF1, CD150, IPO-3), BLAME (SLAMF8), SELPLG (CD162), LTBR, LAT, GADS, SLP-76, PAG/Cbp, CD19a, and a ligand that specifically binds with CD83.

38. The isolated CAR polypeptide of claim 25, wherein the costimulatory domain comprises the amino acid sequence of SEQ ID NO: 7, or an amino acid sequence having at least one, two or three modifications but not more than 20, 10 or 5 modifications of the amino acid sequence of SEQ ID NO: 7, or a sequence with 95-99% identity to the amino acid sequence of SEQ ID NO: 7.

39. The isolated CAR polypeptide of claim 25, wherein the intracellular signaling domain comprises a functional signaling domain of 4-1BB and a functional signaling domain of CD3 zeta.

40. The isolated CAR polypeptide of claim 25, wherein the intracellular signaling domain comprises the amino acid sequence of SEQ ID NO: 7 and the sequence of SEQ ID NO: 9 or SEQ ID NO: 10, or an amino acid sequence having at least one, two or three modifications but not more than 20, 10 or 5 modifications of the amino acid sequence of SEQ ID NO:7 and the amino acid sequence of SEQ ID NO:9 or SEQ ID NO:10, or a sequence with 95-99% identity to the amino acid sequence of SEQ ID NO:7 and the amino acid sequence of SEQ ID NO:9 or SEQ ID NO:10.

41. (canceled)

42. (canceled)

43. The isolated CAR polypeptide of claim 25, comprising:
(i) the amino acid sequence of any of SEQ ID NO: 109, 99-113, 213-233, or 267-270;
(ii) an amino acid sequence having at least one, two or three modifications but not more than 30, 20 or 10 modifications to any of SEQ ID NOs: 109, 99-113, 213-233, or 267-270; or
(iii) an amino acid sequence with 95-99% identity to any of SEQ ID NO: 109, 99-113, 213-233, or 267-270.

44. A vector comprising a nucleic acid molecule encoding a CAR polypeptide of claim 1, wherein the vector is a DNA vector, a RNA vector, a plasmid, a lentivirus vector, adenoviral vector, or a retrovirus vector.

45. (canceled)

46. An immune effector cell comprising the nucleic acid molecule of claim 1.

47. A method of making an immune effector cell, comprising transducing the immune effector cell with the vector of claim 44.

48. A method of generating a population of RNA-engineered cells comprising introducing an in vitro transcribed RNA or synthetic RNA into a cell, where the RNA comprises the nucleic acid molecule of claim 1.

49. A method of providing an anti-tumor immunity in a mammal comprising administering to the mammal an effective amount of a cell comprising the CAR nucleic acid molecule of claim 1.

50. (canceled)

51. A method of treating a mammal having a disease associated with expression of BCMA, comprising administering to the mammal an effective amount of a cell comprising the CAR nucleic acid molecule of claim 1.

52. The method of claim 51, wherein the disease associated with BCMA expression is:
(i) a cancer or malignancy, or a precancerous condition chosen from one or more of a myelodysplasia, a myelodysplastic syndrome or a preleukemia, or
(ii) a non-cancer related indication associated with expression of BCMA.

53. (canceled)

54. The method of claim 51, wherein the disease is an acute leukemia chosen from one or more of B-cell acute lymphoid leukemia (“BALL”), T-cell acute lymphoid leukemia (“TALL”), acute lymphoid leukemia (ALL); chronic myelogenous leukemia (CML), chronic lymphocytic leukemia (CLL); B cell prolymphocytic leukemia, blastic plasmacytoid dendritic cell neoplasm, Burkitt's lymphoma, diffuse large B cell lymphoma, follicular lymphoma, hairy cell leukemia, small cell- or a large cell-follicular lymphoma, malignant lymphoproliferative conditions, MALT lymphoma, mantle cell lymphoma, Marginal zone lymphoma, multiple myeloma, myelodysplasia and myelodysplastic syndrome, non-Hodgkin's lymphoma, plasmablastic lymphoma, plasmacytoid dendritic cell neoplasm, Waldenstrom macroglobulinemia; a prostate cancer, pancreatic cancer, lung cancer; or a plasma cell proliferative disorder, monoclonal gammapathy of undetermined significance (MGUS), Waldenstrom's macroglobulinemia, a plasmacytoma, systemic amyloid light chain amyloidosis, and POEMS syndrome, or a combination thereof.

55. The method of claim 51, wherein the cell is administered in combination with one or more of:
(i) an agent that increases the efficacy of the cell comprising the CAR nucleic acid or CAR polypeptide;
(ii) an agent that ameliorates one or more side effects associated with administration of the cell comprising the CAR nucleic acid or CAR polypeptide; or
(iii) an agent that treats the disease associated with BCMA.

56. The method of claim 51, wherein the cell is administered in combination with a checkpoint inhibitor.

57. (canceled)

58. (canceled)

59. The cell of claim 46, further expressing a molecule that comprises a first polypeptide that comprises at least a portion of an inhibitory molecule, associated with a second polypeptide that comprises a positive signal from an intracellular signaling domain.

60. (canceled)

61. The method of claim 55, wherein the agent is an mTOR inhibitor and the subject is administered a low, immune enhancing, dose of an mTOR inhibitor.

62. (canceled)

63. The method of claim 51, wherein the cell is administered in combination with a cell comprising a CD19 CAR molecule.

64. The method of claim 63, wherein the disease associated with BCMA is multiple myeloma.

65. (canceled)

66. The method of claim 51, wherein the cell is administered to the subject by one, two, three, or more separate administrations of a partial dose,
optionally wherein a first percentage of the total dose is administered on a first day of treatment, a second percentage of the total dose is administered on a subsequent (e.g., second, third, fourth, fifth, sixth, or seventh or later) day of treatment, and optionally, a third percentage (e.g., the remaining percentage) of the total dose is administered on a yet subsequent (e.g., third, fourth, fifth, sixth, seventh, eighth, ninth, tenth, or later) day of treatment,
optionally wherein 10% of the total dose of cells is administered on the first day, 30% of the total dose of cells is administered on the second day, and the remaining 60% of the total dose of cells is administered on the third day of treatment, and
optionally wherein the total cell dose comprises 1 to 5×10⁷ or 1 to 5×10⁸ cells.

67. The isolated nucleic acid molecule of claim 1, wherein the encoded intracellular signaling domain comprises a primary signaling domain comprising a functional signaling domain derived from CD3 zeta, TCR zeta, FcR gamma, FcR beta, CD3 gamma, CD3 delta, CD3 epsilon, CDS, CD22, CD79a, CD79b, CD278 (also known as “ICOS”), FcεRI, DAP10, DAP12, or CD66d.

68. The isolated nucleic acid molecule of claim 67, wherein the encoded primary signaling domain comprises a functional signaling domain of CD3 zeta, wherein the CD3 zeta comprises the amino acid sequence of SEQ ID NO: 9 or SEQ ID NO: 10, or an amino acid sequence having at least one, two or three modifications but not more than 20, 10 or 5 modifications of the amino acid sequence of SEQ ID NO: 9 or SEQ ID NO: 10, or a sequence with 95-99% identity to the amino acid sequence of SEQ ID NO: 9 or SEQ ID NO: 10.

69. The isolated CAR polypeptide of claim 25, wherein the intracellular signaling domain comprises a primary signaling domain comprising a functional signaling domain derived from CD3 zeta, TCR zeta, FcR gamma, FcR beta, CD3 gamma, CD3 delta, CD3 epsilon, CDS, CD22, CD79a, CD79b, CD278 (also known as “ICOS”), FcεRI, DAP10, DAP12, or CD66d.

70. The isolated CAR polypeptide of claim 69, wherein the primary signaling domain comprises a functional signaling domain of CD3 zeta, wherein the CD3 zeta comprises the amino acid sequence of SEQ ID NO: 9 or SEQ ID NO: 10, or an amino acid sequence having at least one, two or three modifications but not more than 20, 10 or 5 modifications of the amino acid sequence of SEQ ID NO: 9 or SEQ ID NO: 10, or a sequence with 95-99% identity to the amino acid sequence of SEQ ID NO: 9 or SEQ ID NO: 10.

71. The isolated nucleic acid molecule of claim 1, wherein the encoded CAR is expressed in frame and as a single polypeptide chain.
